United States Patent Application Publication US 2015/0086982 A1 - sequence listing, part 11

SEQ ID NO: 146 - DNA, 1078171 bp, Unknown
  Unclassified
cacacacacacaccacccacacaccacaccacacaccacaccacacaccacaccacacccacacacccacacacacttttcacatctacctctactctcgctgtcataccttacccggctttctgaccgaaattaaaaaaaaaatgaaaatgaaaccctgttctttagccctacagcacttctacatagccctaaatagccctaaatagccctcatgtacgtctcctccaagccctgttgtctcttacccggatgttcaaccaaaagctacttactacctttattttatgtttactttttatagattgtctttttatcctactctttcccacttgtctctcgctactgccgtgcaacaaacactaaatcaaaacagtgaaatactactacatcaaaacgcatattccctagaaaaaaaaatttcttacaatatactatactacacaatacataatcactgactttcgtaacaacaatttccttcactctccaacttctctgctcgaatctctacatagtaatattatatcaaatctaccgtctggaacatcattcgctatccagctctttgtgaaccgctaccatcagcatggtaccctcgtgttatctgcagcgagaacttcaacgtttgccaaatcaacccaatgtggtaacaaccacacctccgaaatctgctccaaaagatattccagtttctgccgaaatgttttattgtagaacagccctatcagcatcgacaggaatgccgtccaatgcggcactttagatggggtaactcccagcgcaagctgatctcgcaagtgcattcctagacttaattcatatctgctcctcaactgtcgatgatgcctgctaaactgcagcttgacgtactgcggaccctgcagtccagcgctcgtcatggaacgcaaacgctgaaaaactccaactttctcgagcgcttccacaaagaccgtatcgtcttttgcctcccattcttcccggcactttttctcgtcccagttcaaaaagtactgcagcacctctgtcttcgattcacgcaagttgctccatactttataatacaactctttgatctgccttccagacatgcggaaaacttggctcccttgcttgcctcttgtcgaatccaatacactaattgtttctcttcttctagtaatggccaggtaccaagcataatttctctgtatctgagagtagatctctcccctttttacgctaaaaaatttcaaataccctacagggtccccatgatatggctcgatgtcttccaagtattctttgtattcctcgtcatttcgcagcattctctccacagctagtgcttcccaagccatcctccgatacgatactttctggccagcccaacagacacagagctcgaacatcttttgacagcccttgcataatccgtattgtgtgaatactccctctgggcagaagtatacgtcaataccatagaggaaaagatgtttaatttcgtcagaccgaaatccaagaaactgtaagacattcatattctcggaagtattgggaaattgtgctttcagtttctttctctctagcaaaaccatttgactccctttccgcttatacgactctttgttaatgtcggtgactggatggaatctattatcctcagcattgccatctttattggcgtcctccttggcactagcgttggtactttcagtggtagtagcattagtgctggagttggtgctagcagtggtagtagcactagtgttggagttggtaccttcagtggtagtagcattagtgctggagttggtactttcagtggtagtagcattagtgttggagttggtactttcagtggtagtcgcactagtcctgacgttgatgctggcagtggtagtagcattagtgctggagtcggtactttcagtggtagtagcactagtgttggagtcggtactttcggtggtagtagcactagtgttggagttggtactttcagtggtagtcgcactagtcctgacgttgatgctggcagtggtagtagcactagtcctgacgttggtgctggcagtggtagtagcattagtgctggagttggtactttcagtggtagtcgcactagtcctgacgttgatgctggcagtggtagtagcactagtcctgacgttggtgctggcagtggtagtagcattagtgctggagttggtagtcgcattggtactggcattagcactaccatgaatgcacgtgttgctgtcctcatcactgctgcaatactttctgcacctgtcactgctattgctctcctggaagctagacggtaacgcaacgatcgacatggaagctgtcgcctgtttttcagccaatctgtccattctttctatcagttccactgtgtcagcagacaggtctgtcctggagccacagcatccaacatgctggcccttttttcctttctttgattcaagtccatagaactcgcgtacctgttcggttatacagccttccttaatcggtggtaattcacccttacgattccttgccgcccaactgttttttctagataatagataacagaggcccccatctcttagtctccctacgccttgaatgagctcaataatattaagtctattatcaagcatgatcaccatcatcaattgcttaatgtcaattccttcagtcactaatttcgttccgatgagaactcgcatgctaccgtcagtgacaaactcctttgtgcgagacaccttttctgcagcacccagcttcccgtgtatccataccaccctaaaatactttctccaagagcaggccaattcttccacttcgttggttgtgcttgcaactacaatggccttcgactctggttcaatttcaaagagggctaaaagaagcttcagtgcttcttcgggctgtgattccactttcttccaaattttatgaacatgccctaaaggcacctcggatttctccttgattagattaaacatccgtgttggatagctggatagacctctgctgagatcttccgaccgtttgagctcgttgatgtccatcgacttcttggccagtcccgtaagcccaatacgctgcaacgcagcatcagctacagcctcaggtgctgtgccgctcaaaaagattgctttctcaaaagcgtcaaaatcaaggttagttatgcccccaaattgcgactgccggtagacctccgtttcaaagttgtgaaactcatctacaatgaggtaacccaattttacgttgttggtcctaaaggtgcactcaacaatattctcccacgcagctatcctgtctgtgaaattagtgctagcaagatcatcgtagatccccacgtataaatcagtaacgccatcgcaaccttcttcaataaagtttcttacaggggccacattcaagcaaccgcatcggcccaacctgatcatgcaattagcaagcaacactgtgtacggtacaaacagaaacgacacatatttcacgtcgcccttagacgccagtgctatcaaggggagatgaaataactccgtcttaccatagcccggtggggcctgtactgccacagagggtgtgtctgccatgtatatttcatgacataagcgcaactgatgcaagtccctgaattcaaaggagctgccaaagagtttctggcctgcgacgaggatatcgtttgtactcttgggctctcggggcctttttcgcgttactcttgaaattttttgatcatgatctgaactcgccgcctcacctgccactacgtcttccgcattccgagtactagagaatgaacaatggtagtcgctttcaaggcctaaccattgaatccagcgctcggaagtgagtccgtcaagcgtctttagtcgaggctccgatgaaccgttcttgttgtatcgtcgacgtatacgttgcgctgtagctctggataacggtaagcgtatcaccgtaagctcgtcaattatttttgagagccgcggtcattttgttagtatctcttctcaacttgggcagcacacatgcaaaacatcacccaatcggtcctttttgttcatcatatcgttacatatctgtgaaaagtactttatctcaatgggtttacgtgggcatagatcacgcttcagccgctctgtgtcgactttcttttcgccaggtaaacttgcttggtatgcagaaaaaatcgatagctcatctacgtgtagtaacaaaaacatgtggggtgccaaattgtacccatatctccttatggtgcttttctgaagactccttacaataggtgcgccagaaacaaagtcagtgaaagtacgcatcgtagagctgtcgttcggcctggcactcgctatttcgtgacaacgttccaggacacggaaactcaactcattatagtatcctctgttgaggtaaaaaagagaaagggtatcgtaatcctttctattgaatttcaaagtatgcacttgaaacaacgtgtagaccatcaagttgattttcttgggaataagatactttgaagggattggtccgccctggaaatctggttcgtcttcaacaaacgtcaggaacttttgtacatttttcccgaccatgacggaaacgacaattttttcaaaagaccttttcctatccattgcaccagttctgaattttaccactttgattaggccagacttttcgtcttcgtagaatgaccgcacttccgtggggatcgattcaaataaagttattgagggacaatgtaccaagtcgtttttgttatttagagccgactcaaactcgtcaaagtttgctttttcaaacttacgcctatcggaaactttcattttatttttgtaagtttcgaaattaacaatagtatgttgattgttatgctttttgacaagaaatccatcaatataaacaaaagattgtccagtttccgtcttatcatcatctaagaatgtaataattaagctactctattgagaagaagcagaatctgcgctatgcaggtgcaaatctccagcagcagcaaagaaaattcagttaataagaaatctcactaagataagcgactgtctgtcccaacatagaaaacagaaggatgtctcattcatccttgatttccggcctgcaaaaataaagtagtcggtacgtacgttcgttttcaatttccatggtgcacagtatcttaactatctgcttagtcgaggagaaccaggattctgttcgttgctcagccgcttcgtggatattctcttggatactttaaatatggacctacgcttagcctgcgcttagcctacaacttcttccgctctcgaaaagaccaatataatagaaagttataaattacatttccttattaggtatacgacctcgcgcttcgaagtagaggagccctttttggcgtacctacatatggcgcgtcagacagacaaacttcccccaaaaatgtattaccctgccgaataagaaaacagacccattcacccacgacgtatcaagttacttccttggtgcaatgtcccactataaaaaaattccttgacgctagatcgttggactaaaatctgcgtcacaatcgcctaaacaggaaatattgcctattttcgtacaaggttacttcctagatgctatatgtccctacggccttgtctaacaccatccagcatgcaatacagtgacatatatatacaccacacccacacaccacacccacaccacacccacacccacacacaccacacacccacacactctcttacatctacctttactctcgctgtcacaccttacccggctttctgaccgaaattaaaaaaaatgaaaatgaaaccctcttctttagccctacaacacttttacatagccctaagtagccctcatgtacgtctcctccaagccctgttgtctcttacccggatgttcaaccaaaagctacttactacctttattttatgtttactttttatagattgtctttttatcctactctttcccacttgtctctcgctactgccgtgcaacaaacactaaatcaaaacagtgaaatactactacatcaaaacgcatattccctagaaaaaaaaatttcttacaatatactatactacacaatacataatcactgactttcgtaacaacaatttccttcactctccaacttctctgctcgaatctctacatagtaatattatatcaaatctaccgtctggaacatcatcgctatccagctctttgtgaaccgctaccatcagcatgtacagcggtaccctcgtgttatctgcagcgagaacttcaacgtttgccaaatcaacccaatgtggtaacaaccacacctccgaaatctgctccaaaagatattccagtttctgccgaaatgttttattgtagaacagccctatcagcatcgacaggaatgccgtccaatgcggcactttagatggggtaactcccagcgcaagctgatctcgcaagtgcattcctagacttaattcatatctgctcctcaactgtcgatgatgcctgctaaactgcagcttgacgtactgcggaccctgcagtccagcgctcgtcatggaacgcaaacgctgaaaaactccaactttctcgagcgcttccacaaagaccgtatcgtcttttgcctcccattcttcccggcactttttctcgtcccagttcaaaaagtactgcagcacctctgtcttcgattcacgcaagttgctccatactttataatacaactctttgatctgccttccagacatgcggaaaacttggctcccttgcttgcctcttgtcgaatccaatacactaattgtttctcttcttctagtaatggccaggtaccaagcataatttctctgtatctgagagtagatctctcccctttttacgctaaaaaatttcaaataccctacagggtccccatgatatggctcgatgtcttccaagtattctttgtattcctcgtcatttcgcagcattctctccacagctagtgcttcccaagccatcctccgatacgatactttctggccagcccaacagacacagagcccgaacatcttttgacagcccttgcataatccgtattgtgtgaatactccctctgggcagaagtatatgtcaataccatagaggaaaagatgtttaatttcgtcagaccgaaatccaagaaactgtaagacattcatattctcggaagtattgggaaattgtgctttcagtttctttctctctagcaaaaccatttgactccctttccgcttatacgactctttgttaatgtcggtgactggatggaatctattatcctcagcattgccatctttattggcgtcctccttggcactagcgttggtactttcagtggtagtggcattagtgctggagttggtgctagcagtggtagtggcattagtgctggagttggtgctagcagtggtagtagcactagtgttggagtcggtactttcggtggtagtagcactagtgttggagtcggtactttcggtggtagtagcactagtgttggagttggtactttcagtggtagtcgcactagtcctgacgttgatgctggcagtggtagtagcactagtcctgacgttggtgctggcagtggtagtagcattagtgctggagttggtactttcagtggtagtcgcactagtcctgacgttgatgctggcagtggtagtagcactagtcctgacgttggtgctggcagtggtagtagcattagtgctggagttggtagtcgcattggtactggcattagcactaccatgaatgcacgtgttgctgtcctcatcactgctgcaatactttctgcacctgtcactgctattgctctcctggaagctagacggtaacgcaacgatcgacatggaagctgtcgcctgtttttcagccaatctgtccattctttctatcagttccactgtgtcagcagacaggtctgtcctggagccacagcatccaacatgctggcccttttttcctttctttgattcaagtccatagaactcgcgtacctgttcggttatacagccttccttaatcggtggtaattcacccttacgattccttgccgcccaactgttttttctagataatagataacagaggcccccatctcttagtctccctacgccttgaatgagctcaataatattaagtctattatcaagcatgatcaccatcatcaattgcttaatgtcaattccttcagtcactaatttcgttccgatgagaactcgcatgctaccgtcagtgacaaactcctttgtgcgagacaccttttctgcagcacccagcttcccgtgtatccataccaccctaaaatactttctccaagagcaggccaattcttccacttcgttggttgtgcttgcaactacaatggccttcgactctggttcaatttcaaagagggctaaaagaagcttcagtgcttcttcgggctgtgattccactttcttccaaattttatgaacatgccctaaaggcacctcggatttctccttgattagattaaacatccgtgttggatagctggatagacctctgctgagatcttccgaccgtttgagctcgttgatgtccatcgacttcttggccagtcccgtaagcccaatacgctgcaacgcagcatcagctacagcctcaggtgctgtgccgctcaaaaagattgctttctcaaaagcgtcaaaatcaaggttagttatgcccccaaattgcgactgccggtagacctccgtttcaaagttgtgaaactcatctacaatgaggtaacccaattttacgttgttggtcctaaaggtgcactcaacaatattctcccacgcagctatcctgtctgtgaaattagtgctagcaagatcatcgtagatccccacgtataaatcagtaacgccatcgcaaccttcttcaataaagtttcttacaggggccacattcaagcaaccgcatcggcccaacctgatcatgcaattagcaagcaacactgtgtacggtacaaacagaaacgacacatatttcacgtcgcccttagacgccagtgctatcaaggggagatgaaataactccgtcttaccatagcccggtggggcctgtactgccacagagggtgtgtctgccatgtatatttcatgacataagcgcaactgatgcaagtccctgaattcaaaggagctgccaaagagtttctggcctgcgacgaggatatcgtttgtactcttgggctctcggggcctttttcgcgttactcttgaaattttttgatcatgatctgaactcgccgcctcacctgccactacgtcttccgcattccgagtactagagaatgaacaatggtagtcgctttcaaggcctaaccattgaatccagcgctcggaagtgagtccgtcaagcgtctttagtcgaggctccgatgaaccgttcttgttgtatcgtcgacgtatacgttgcgctgtagctctggataacggtaagcgtatcaccgtaagctcgtcaattatttttgagagccgcggtcattttgttagtatctcttctcaacttgggcagcacacatgcaaaacatcacccaatcggtcctttttgttcatcatatcgttacatatctgtgaaaagtactttatctcaatgggtttacgtgggcatagatcacgcttcagccgctctgtgtcgactttcttttcgccaggtaaacttgcttggtatgcagaaaaaatcgatagctcatctacgtgtagtaacaaaaacatgtggggtgccaaattgtacccatatctccttatggtgcttttctgaagactccttacaataggtgcgccagaaacaaagtcagtgaaagtacgcatcgtagagctgtcgttcggcctggcactcgctatttcgtgacaacgttccaggacacggaaactcaactcattatagtatcctctgttgaggtaaaaaagagaaagggtatcgtaatcctttctattgaatttcaaagtatgcacttgaaacaacgtgtagaccatcaagttgattttcttgggaataagatactttgaagggattggtccgccctggaaatctggttcgtcttcaacaaacgtcaggaacttttgtacatttttcccgaccatgacggaaacgacaattttttcaaaagaccttttcctatccattgcaccagttctgaattttaccactttgattaggccagacttttcgtcttcgtagaatgaccgcacttccgtggggatcgattcaaataaagttattgagggacaatgtaccaagtcgtttttgttatttagagccgactcaaactcgtcaaagtttgctttttcaaacttacgcctatcggaaactttcattttatttttgtaagtttcgaaattaacaatagtatgttgattgttatgctttttgacaagaaatccatcaatataaacaaaagattgtccagtttccgtcttatcatcatctaagaatgtaataattaagctactctattgagaagaagcagaatctgcgctatgcaggtgcaaatctccagcagcagcaaagaaaattcagttaataagaaatctcactaagataagcgactgtctgtcccaacatagaaaacagaaggatgtctcattcatccttgatttccggcctgcaaaaataaagtagtcggtacgtacgttcgttttcaatttccatggtgcacagtatcttaactatctgcttagtcgaggagaaccaggattctgttcgttgctcagccgcttcgtggatattctcttggatactttaaatatggacctacgcttagcctgcgcttagcctacaacttcttccgctctcgaaaagaccaatataatagaaagttataaattacatttccttattaggtatacgacctcgcgcttcgaagtagaggagccctttttggcgtacctacatatggcgcgtcagacagacaaacttcccccaaaaatgtattaccctgccgaataagaaaacagacccattcacccacgacgtatcaagttacttccttggtgcaatgtcccactataaaaaaattccttgacgctagatcgttggactaaaatctgcgtcacaatcgcctaaacaggaaatattgcctattttcgtacaaggttacttcctagatgctatatgtccctacggccttgtctaacaccatccagcatgcaatacagtgacatatatatacaccacacccacacaccacacccacacacacacacccacacccacacccacacacacacacccacacacaccacacccacacaccacacccacacccacaccacacccacacacccacacccacacacccacaccacacccacacccacacacacccacacagtacctcaacacaacccctaatccaaccctgatgaacctgcctccaaacctaccctccattaccctacctctccactcgttaccctgtctcattcaaccgtaccactcccaaccaccatccatctctctacttaccactaaccaccgtccaccataaccgttaccctccaattacccatatccaactccactaccgcttaccctaccatcgacgatgtcctactcactgtactgttgttcacccaccatattgaaacgtctacaaatgatcgtaaataatacacatatacttatcctaccactctaatcccactaccacatgccatactcaccttcacttgtatactgatatggcatatgcacacggatgctacagtatataccactctcaaacttaccctactctcacattccactccatcacccatctctcaccatcagtaccaaatgcactcgcatcattatgcacggcacttgcctcagcggtttataccctgtgccatttacccataaagtccatcattatccacattttaatatctatatctcattcggcgaccccaaatattgtataactgcccttaatacatacgttataccacttttgcaccatatactaaccactcaatttatacacacttatttcaatatacccacaaaatcaccaccaaaatcacctaaacataaaaattatttatctttcaactttacgaaataaacatattgacttgaagtatgagcactaccataacgtcattaacgtaaaagttccttaatattaccatttgcttgaacggatgccatttcagaatatttctaactttcacagaccatacattagaataatatgccacctcactgtcgtaacactctatattcaccgagaaacaatacggtagtggctcaaactcatgccggcgctatgataaaattgtatcctatttccattcccatatgctaaccgcaatatcctaaaaggataactgatgcatctttaatcttgtatgtgacactactcatacgaagagactatatctaaagaagacgatacggtgataggtttgttgtttttgtaggagtcaacgaaacgccaaataattctacggtaatataacttatcagcgccgtatactaaaacggacgttacgatattgtctcacttcatcttaccaccctctatcttattgttgataaaacactaacccctcagctttatttctagttacagttacacaaaaactatcgcaacccagaaattttgatattttaagtgtcaaaaatgagggtctctaaatgagagtctggtaccatgacttgtaactcgcactgccctgatctgcaatcttgttcttagaagtgacgcatattctatacggcccgacgcgacgcgccaaaaaatgaaaaaagaagcagcgactcatttttatggaaggacaaagtgctgcgaagtcatacgcttccaatttcattgttgtttattgggcatactctgttagctttatttccgtccacgctttttctacaatagtgtaaaagtttctttcttatgtttatcgtattcatgaaatacttcacgaacaccgtcattgatcaaataggtctataatattaatatacatttatataatcaacggtatttatatcatcaaaaaaagtagtttcttattttattttttcattacttttcactgtctatggattttcattcgtaaaggcatcactccctagtttgcgatagtgtagataccgtccttggatagagccttggagatagctggctttaatctggtggagtaccatgggacaccggttatcattctggtcacttggtctggggcaataccagtcaacatggtggtgaagtcaccgtagttgaaaacggcttcagcaacttcgactgggtaggtttcagttgggtgggcggcttggaacatgtagtattgggccaagtgagctctgatatcagagacgtagacacccaattcaaccaagttgactctttcgtcagattgagctagagtggtggttgcggaagcagtagcagcgatggcggcaacaccagcagcgattgaagttaatttgaccattgtatttgttttgtttgttagtgctgatgtaatcttaacaagaaatagtgaaatgaaagcgcatacctcaaaggcatatagttgaagcagctctatttatacccgttcctccatctgtcatcactacttaaacgattcgttaacagacgctcatttagcacctcacatattctccatatctcatctttcacacaatctcattatctctatggagatgctcttgtttctgaacgaatcgtacatctttcataggtttcgtatgtggagtattgttttatggcactcatgtgtattcgtatgcgcagaatgtgggaatgccaattataggggtgccggggtgccttgaaaaacccttttgcgcgcgcctgtgacatttcctttttcggtcaaaaagaatatccgaattttagatttggaccctcgtacagaagcttattgttaaagcccatactcagtctgttctaaacggcttccatggaagaaaaataactatattatagctttcctaaaagtttaattaagaatagcagacatgtgttgggagtcgtatattgttagaatctgtagttttaggtgttctcagtaaattcattgaaacaattgcgtacttgtaggcttctgagaagcagatagtagtcaaatagttgatatctaaagagctgccgaagggggtttctgtatccgcgtaagtaattttttgaaattttaatgtgatttttggcggaatggtgtgagtggttcacttctcatcttcaatttcatcgtcttatatttcgataataaaacaatacagtgagcgttgttattaagtaaatcataggcacttggtatcatataattcaaaatcaagtagttgtagtagtgcgtgtgtgcgtgttagtaattgttgatggcctagttcatctccttattgaaaaatgataaacaggtggcagtttcaattgtagtaaatatttattcatttttttattattgctaacgtatctgaaggctacgatgtaacgcagctcatctcttttaaacataaaagtcatttgtgtaatgtagagatttacaaagattttaaaaaaataacaaaactatacaaaactatctatatttgaatacttcctactatttttttttttttaactataatgaatgaatgcatgccatattgacttacgtaacaaggtggcctattggtaatatattacatatcatcatcctatatgtgtagcataatttgtccattctttatccgcattcaggcactcccaatctttatctctaaggcaaagagcaaccaccatttcacctctggaggatctaggcataaaatatattaggctctcaagggaaatgaagcgcggccgtcgtacactcttgggcttcccaagccctagattgaaatcaacgtcatacaggctgacttttgcccacgaactgaccataattccagataaagtatcaattggttgaggtatagaaaccttagtcttgtccgggcatcggctaaggagcgtagcaagtgcgcatgtattataggccaaatcgaagactttagggtctagcttcctgcgaatctgtgatgcaagaacgcccaaacttttatgatccaagcttttcagggaacctgtattaaaggtcatgttgactaataaccctggatacgtttcggggagtcctagccgttttctaacatccacagcacgccctaaatttgatttcgtttctggtttaagtcgagataaacgggctcgagaaactgatttccagatgaaagcagtgacgatatcatcagtggagacaaattttgtgccagaagtacatgtctgcattgccaaaatcctcagattctgcaatgagatagcagaaaattcaacataagcccaagtagagttcgaagaacaagactgttccttttcctctccacttgtatttctagaggtttccactatttcatgaactagcgtggtgtcgggttcccaagtttcatcaaacaaaggaatagatttgcttttatctatatttccaatgagcagttcttcatcagagaaaggtttttggtggcaagatttattgagcaagttgatgatactttcctgtcctgttatatccataatattgtgctgcccgacaatagttaagacgaggccgccggagataaagtttgcttgaactgcaaatacaggcccactcttggcggccatacctatagtgtttccaggtggattgatagtcatgcaaggcgcaaaagtcttttcgtctaacatgtagataggaaagtcagctttttcaagcgaatccattgttggggcagacagatcttctcgaagatcttggacgataagtggaattttgtctgacgggacaattctgtaggtaccagtgttaccttcgtcagcaccttcatttacgacatttcctgctagccactggaaatttttagccaatgtttcaagtcctcttgttaaggtatttacgatatggtcatgagcagaaggatctggtacacggtagatagagcatatttgagtgtatagtttgtatagcgaaggttgttgtcccaaaatatcaagttgatcgttttctagcatctgtacactttttgtacgtttctgagagatgatcttgactctaaacatccatctaccttcaaagtgaaatttatagtcacgtccgtcattatgcacgtcttaaacattaaaatcttgataaatacactgtaaaagctttaacgttattggaatagaaactctcatcactcagagaccatcagttacctgcaaaacgtttcatatttgtatataaaccatgagattaagtggtctgaaattatgtatcattttttgcattctagcatgccacagcaagggggtacacgtattttttgatggtgaataagatagaaatgcataccgtgatacttcaagctggcactatctttatatcttcctccgtatatagcacttgaagctctgtatctagaatatcctctttagtccgggacgtgcctccaaatacttacggattggcgaaaaatatgcactgaaatgtgtgcaaattaaccaaaatagggcaggcagtaaaaagttctaatgatttttctatttgatcaagataaaataaccttctgctgaggaccgcacattgacgtatatacactgcttttagttttgtagatacaagatatttgttaaaagaaattgaattaggagtatttatctacagctgatgcaatttcggcgatatctttaggagacgttctacaacaaccgccaataatgcgcgcaccattatcaacgaatttcttaaccgtggtctcccagtcatccaacttattagtcggccggtgccatgtcttctctttgggattgtagatttctccactgtttgggtaaactagcagaggcatgccaggtagatgctcgtgcaacattttaagaattaatgccgattgattgaaactgacacagttaactcccattaataagagattcttgttaattttatttccgaggccttttatatggacagaaatttcttccaaagtggtaccgtctcgtagcaaactattgtcatccaccgacaacccaatataaaagggcttcgaaataatatcttcatcccaggataaaatagcctttaactcatgaaaatttggaatcgtttcaaaaccaataagatcaatatctctattttggttgaagttctccagctggggtttgaaaaagccgtagtaatcaatattctcaggatggggaccatagtcaccagtatattcacaggatacatgtgctgcccatgggccaatactcccgattaagtacctttcctcaccaataaattcacgagtaaatgacacgattttatcgagaaaacgcttgtaagcagccagagttttaatcgaggtattctcagatatgctttgaaagtttgcctggtaagtaattgtcattaatatgtttgcgccagcaatcataaagtctctgtacatttcttctaccacctttcgctcttgagaagatggctcccaaaaggattcgctcgtaaaaggagctgcagaccataccggactatttatgttaatgcctctgttttccaattctgtaccctgtccaccatcaaggataagaacttttccggggtgctcaactattagttctttgattggaatgcgcttcatctgttttttgattactttttcaagttgcacactaaaagttgctgattcagatttcttctacaacttgtctgtttaaattatcttccttagtagtacattttcaaattggcgttgttgctgttttgctattaccattgaatacctcgccacaatttggtagtactttcatgccacagtttttacttttccacagttcctgcaggaatggctttttttcattaactttttgcggggatagcgaagagatgccaggaaataaatgcgtatatattttacagatttgggtggttaagtaatcaccgtcaagagttctccatcaggataccatgaaagatacccgaaatggatgaatttgaatctaccaaactttcgaaggttcagttttccactagcgtgttaagtacgccttcgaatgaaggaaataatctaatacacagattcaagaactctttcaagcgaaatgattcaccagcgatccaagaaggtttgctgtattcggagctttcagaggaagaaaaaatacaatgggacttagccaaccagccgtataaaaaggtcctagatcaaagacacctgaccatgatagccattggaggtactctagggacgggtcttttcattggtttaggggaatcactagcgtccggacctgcttctttgctaattggtttcttgttggtcggcgcatctatgctctgtgttgttcagtgtggggccgaactttcatgtcagtaccctgtttccggctcctatgcgctgcacgccagtagatttatagacccatcagtcggcttcagtataggaattaactacttattgatgtggctcatatcttaccctagcgagctggtaggatgttcgcttaccatctcttattgggcaccatcggtcaatcctgctgcctgggttgcaatcgcgttcgttttaagcatgctattgaatctttttggggcaagaggctttgcagaatcagagttttatatgtcaattttcaaaattgtggctctattcatttttataattattggtattgttctcattgcaggtggtgggcctgattctactggatacatcggcacgaagtattggcacgatccaggctccttcgctgttcctgttttcaaaaacctctgcaatacttttgtttcggcagcatactcctttagtggtacagaaatggttgttttaaccagcactgaagcaaggagtgtttcctcagtctctcgggcagcgaaaggtacgttctggagaattatcatcttttatattgttacagtgattataattggttgcctggtcccttataatgatcctcgtctgattagcggttcatccagtgaggatattactgcttccccgtttgttattgccttgagcaatactggtgctatgggaacaagagtgtctcattttatgaatgcggtcatcttgatagccgtattttctgtttgcaattcctgcgtttacgcatcctctagattgattcagggtttggcgacagcaggccaacttccaaagatctgcgcttacatggacaggaatggtcggcctttagttggcatggctatatgtggcgcttttggattgttaggctttttggttgtttccaagaaccagggtacagttttcacatggttgtttgcgttgtgttccatttcatttttcacaacttggttctgtatttgcttctgtcaagtcagatttaggatggcaatgaaagctcaaggaaggtcaaaggatgacattatctatagatcgacattagggatatacggaggaattttcggctgtatcttaaatgttctattggtaattggagaaatatatgtatcggctgcacccgtgggtagtcccagttctgctgctaatttctttgaatattgtatgagtattcccataatgattgctgtatatattggccatagaatttaccgcagagactggagacactggtacatcaagcggatggatattgacctcgatagcggacattcgttagaggacttcgaagccaccaagcttgagagggatgaggataagaaatacgtttcctctaagccactttactataggatctatcggtttttctgttaacttagtgaagtacttcatttgaatattaattaataataattttatgagccgggaattttgcatctatattctaggtttctagcaaccgtagttttacgtaagatgtatttttttttgaatattccgttttagaatgatattctaggccctgtatattctccaataacagcggcacgtccaggttctgtgacaatgctaatatattccttttttttttttttttaacttagtatacgctgtattggaatcagtgatttcatctaagtttactaacgcttacacaattgtggaagaagaggatagaaacacctcagatccccttgttacggtaaaacccctattctatgcctcagtaataactagaaatagccgattatcattatgttaagcctgtcgatacgcattacagttcaaaaaaaaggcggacatcgtggttgatatttgtttgaggccttaaattttattgtattacatgtataaatagctaacaacatttgttcagttggtaccaatcacctttgttgctgggtatccgcacacattaacaagacaatggaaaagggagaaaactaacaatcttaaacgataaaaccggacgaaataacagctgttatttttcatgctagaactaatggcttgatagtatacttgtaccttgtatcttagtgcttgaacggatgattcccgtcgccccacacctatgcatacaagacgtcaatcttcctgtgattatattttgagtatggcgtagtaatcccatatttctcgttgggtggtgctgatatttgaaaattcatgacctgttctacatacggctgccattggtaggaccgcaatcacagtgtaattttgaagaacttacattgggccaatggatgagctgtgaccataatttattagttgtttgtgtcacaagctcagacttagaagttctctattgcaaacattatttcatgtttccttaaattttttttattgcaccaactttagtgaccccttgtgagctccaacatatttgaaatcttcttaaatttctagtcggcaagcagcaaagaatttcagtagtaatctctaccgcggcaatatcgatgcaaatgtaactacctgtaaggatattgtcttcagtggtttggtatggttttgtaccttactcaacatcacgaataaaaaggaaggaatacgaatcatgatattgatgtttaatctttcaccgtcaaacaattaacatatatagtatatatattcttttatagaatactgcttgagctatttttttacttgacagaatggcgccgcgaagaacccctaaattttgtagccctaatttcgatcagttatatatagctatggcaccctcttgaatagcttcatgattggatctttttatatagtttccacgtaccacgcaaaacttgtctcaagtagccactttacgaggattttgaacggatttctagcagtttcttcacgctggggcgctgttgcattctcttataccaagctcgaagcgcctcgcactcttccggcacttgtagttttacaattgcagcaaatattagaccagctattactgtgatgtcagccattgagaatgaatcaccagcaacatatgggcgttctctgagaacggtatcaaaataatgcattccatgtagggctttgtcgcgctggcgaagtccccactctttgttttggtaaagctcgacttcaggccccaatccaggtgtagcatggtgaaaataaacactaacagggtcgagcagttccaactctgcgcgtttgttcatcatgtggattacgcctttttccagcggtgttttgccggtaagagtgggtgtaccatcaagtgcatcaatgtattcagtaatggctgtgcattcagcgattaaagtcccgtcatcaagttcaagcactggcactgtgcctgaatagttcttggcaagaaattcaggcttcttgtgctctcccttccagaggttgatcctcacaaattgcacacttgatagcatgttcttctcagccaaggcaatgcggactcgggccggataaggccctgcgggtgtgtcatatattatcattttttgtttcatcttttcacctccattgtaaatcaggaaacctctgccattcatgtatcctttgtaggtactttatatagagcaccaagtttctatcctttagcaggaagcacattattaatcatttgagacgtaaacgaatgaattagtaagcagtgaaagaaattcgagcactaagcgcgacctaagggaacggacacggaacggagaaactgaagtatcaaatacttccatttgatcaaaccacttgtatccactccctgttttgcacacggtagtagaaggtcttttgaatatttactgtaaataccgatttctatgtccttcttgtccgattataggattcgggtcatttccagcgcctactttccttcttgatttcaaaatgtgtggttaacgtactcccaattgcactactgttcctacagttcacgcgcacctctttctgatgaaaatgcagctgcattaatctgcgatctattggcatctcgctcttgtatctgccctccattcgtgaaattttactctattaccatctttgatcatttttttgtcgcaaatgtgatacggcatccatcgaattttgctcgtaattgtttgccattatcgcccttttcattccgtattattcatccactccgcttcataatgggttccaaaaaaagaactattgtacgagcttttagactcacgaaaacattacttgaacaataattagcgcctgcagaacttgacataataaaattccattttcgatatctagctgtctgaagatatgatatctaagtaatacgggaaagtttccgctattattctctgttgcaagctcacgtgaaaatgtggattcgcgagtggggtgtaagtgaggattgccaagccttttgttcgaaaacttctgcaggaagcgttgtgttgcaaggatgatgcagcatgaaatatgtgttttctttttttcgaggttcactcctacaggtgattccttcgagaaattctgcaacccattgtgatatgatgcctggccgaaagatttcttcatttcttcggagcaggttcggcccgaaatcctcatgatcgagccgaatgccaagaagtaaaacaccaggatgactaaccagttattatcatgtgtatacagtactttggtacctttatcaagaagtatactaaaatataccaacaccacacacatgcacatggtagctgagcgaacagtttcgagatttcagcattaatttcatctaataagactttccgtctgctttcaagatcaacgtgctgaacatttttactctgctttcataatactcccattttaggctttgattcaaaagcccactcaatgcaatacctaaaatgatatccttcaaagatatgtttaatgaatatgcagccacagctttgaattcagattgaccttgtgttgcattaagtcagacacctctagatttgtgtggctgctctcaagaaaggatgttgaagaagatttatttacggaagaaataactgtatacggcattttattctttcttaaacgagcaaattaaagaatagacggatagagactggagctttagcatgtgttccgagaagtccttgacacgcgccacggttgttatgccgcacactacaatgatgtgtttgaaaaagtatattaatgcctattgtcaagatgcaattcatcaattccagcattgagtgattcttctctggtgcggtaaaacataaattttaaatctagtactcaaccaccactgaacaactattaatcatcgtggaaattattatgacggaaattgaatttgggcaaccccttcccagcaatctagactatgctgtttcttttggcattcctacatgggattcggcaataggctatgcggaaaaggtgccagaggtaataggcaaaatggctacaggatatccgaggtactttcctcaaccccccgtccagaggctttgtgcttactttgttaagaaatttgggcgaggttcagaaaactgtcgtccttttccatccgttaacctgggtttaaagtgtttcgagtacgtaaaatctgtctcaggacctgaaagtaaagctcaccttgaagtggaaacagttacgattaaaaaccgtggggcaaaaacgtcgaaagaaccggcggaattggtgctaaccattgctgctgtccttgcatcggaggaagagttcgagactgtgaaagagtattggaaattaagaggtgaatgtgtatctagtcgattggcgttgtctgtcaaccaacttcttgactgcgctaatcatggctcagagcaggtattgcgtgagctagaggctggtgtttttgcagcaaagaagggggaggagaaagcaaagaacctgataaagggaaggatagttgagaatcgcttcaggccctttggtttggagaagaaaaccccgaattgggagggactcaacctcaacccaaatgaagacgtttatcttgtatcaagtggcatgtctgcaatatctacggctcgtaatttactcaccttttgggaggagaagaagaattcaggagattcattaaacaagaccacctctgaccaaaagaaaaagccattattatgtgacactgttggcatcttcggcttccctttcaaagatacgcaggtcattatgactaaatttggaaaatgtaaattttttggatttggaaattctagagacgttgtcgaattacaaaagtttttagaaacaagcaaacaacgcattcttgccgttttcgtcgagacaccttcaaatcctctgctgaatatgccggatttgaaaaaattgaggagtttggccgaccagtatggcttttttattgtaattgatgatactattgggggccttaacgttgacatcttgccctatgctgatatagtcagcacgtccctgactaagcttttcaatggtgctagtaatgtaatgggcggctctgtcgttttaaatccgaaatcatctctgtatccatatgctcgtgagtacttcaggagcgctaatttcgaggatttgttatggtgtgaagatgcgatagttttagaacgtaattccagggattttgaagatagaactttacgtgctaatgcaaacacaggaatattgttgaatgatttgcttttacccgaggaggggaaaatatgcaaaaagatttattatccaactgttacttctaaggagacctttgagaactacgaaagtgtacgtaatgaacgtggtggctatggatgcttgttctctgtagcctttttcaatgagggcgatgcaaaagcattctatgactctttaaaggtattcaagggaccttctaatggtactaactttaccttagcatgtccatatgtccatctggcgcaccactcagaattagaagaagtttccaagtttggggccgaccccaacattattagagtaagcgtaggtttagaagatatccagtggttattgaaagttttttcaagtgctttagatgttgtgaaaagcagaggctccaaacactcatgaagcagatcatgagtagaatatcaaaaatcaagaattctttataatctttatagaatattgtttataaaagtttttttccattctagcatataatttttttggaggaagtcttttctggaaccttcacatggatcttaattaatgaaagtagacagagctcataagatcactagttgtttataaactgaagatgttccttcttattgacttcaacattatatcgctctgaattagttgatctgtaacttcagagtttctttaccagaataaaagcgtcacagtttttctttagtttatatgtacacaggttggggtttactataaactataaaaaagaagtgttgtcgccgctattttaaggtttatacacaattttaaccaaaaaaaagaataagttgagcaacgttggaactgcctctgcaacgaattccggctatatacaacctgcatctttgaaattcaaatatccaaagttaatgaagaaggataataattttcatcattcaaaaactttagatcttccacgggcctttccgcttgtggagtaatcctgaacgcatgtctgtgaattggttcttcccaatcaatcactgctgaatgttgaactctgcggttatcccaaatgacgacggaatgaggttcccatttggctcttaactgtaaatcatggctgctctccactagattgtacaagaaattcaaaagtgattcagattcttgtcttttcaattcgactattttcctagaaaatgcacgattgacatacaagcatttctttttcaagacaggatgaactctgaccagtggatgaatatgcgtgacaggtgctcttctttttatgccgccctggcgctgtgaattctctgcctgttcctttgagctatggatgacatgaagcgtgctcaagaaatcttgcaaaggcttcgacaacctgtcgaaagcctcgatcgtatccgcaaataacgtatctccaccaccatcaggaccttcaacaacactaaagaaagtataagaaggtggctgtaactcgtaagagacgtctgtgtgccagccaccagatgatgtcgagtcatcaaaaactcttgcaaattcttccgcatcaggtcttcggaaagtgatatgcagctcaggattgttttgagggtggccactagtttgatgaatgtgcaacttgccaaaatgtcttccgtattcagtcacataatcgggtccctcgtcagcaaaattctgatttctaaagacaactactcccttttgggcgacaagcaaagcgagttcatcttttgcagcatcagaaagatcagttagctggatcccattgatctcgagacctaatttcggggtgatcttcttcacctttagttgaccaacgttttcttttgcaaaaaggtttgaaaagttaccgtcagctctcaaagcaggatcatggtattcgtgaaattccagcgggccatacttttcagtaggatcccatgtaggcaaataatctggatacttcgatttctctctataagatttacggattttcaataaaccagatggagagacctcatcttggccatcataaaaatgggtatcaaaattcccgtaaccttgcttggaggtataattcaggtttttcaacccatttgtaatgattttgactggtaaatcggtagatggaagagggattgctgtttgagctgctgcaggagacatattttaactgggttactgtgctatgtttgtacaagtatgaaagggccgattatacagcaatagtacacctttttatatgtttctgtcatcaagaactgttactgactccttaacttttccagcattcttgttgtattgcctacataccttctttatgttagtagtatgataaataaactccatgtgccctgtggcgccaaataagaaatcgactcaagccacattgaggcttttgtcatcattcccctatatactaatatagcacctttccaagggccaagagctcgtccaatgagacgcatgagttgggtattttaagctgcacagtagactatatagataaagctaactagtatgtaaaaaacgttacatgctatggcgctcttagaaaaaacgcataatataagcttcaagtcagtttaagctatagttcgcacggatatcttcaagaagaccgatttgttgtggctgccatcccagctcttttctggtaccttcgcttgaaactgggccatctctagtgacaaaacaagtgaggaagccaaaatgactttccgcgtcatcaacagggatagaggccacgggaacattcaaaatttctccaatcacacgcgcaatatctttgaatggtataccttgttcaccaacgcaatgatacacttgtcctgtttttcctttctctaaaacaagtctgaacagaggagccgtatccaaacgatgtacagccgcccaagcgtttgtgccttgtccgacatagccagattttccggcagctttggcaatattcattaatattggtacaaaagccttgtcccccttgccatgaaccgagaatgggagtctgacaattcttgctgaaacacctttgtctttgtaactcaaggcaacctgttcagtgacagcacgcaaaattttggaatcttcatcaataccatcctgttcgttagcaactttgtttggtcgcaaagaaagtgtaccattcgtatataagaaaggcttgttagaacctttaagtgactctagcatagctacagtggcctgacggtcaatttcgcagcactgttcaaaatttttaaaatcatgcacaaatcctaaatgaataacgccatcagattcagtggcaccttttttcaaaatttccagatccttgagatcaccgcgaaggatttttgcagcaggatcaatcgacttaatctttgcagcagcctcgtctgaccttgccaagccaacaacttcatgacccgaggatattagttcagataatacggcagaaccaatgaagccagaagcaccagttataaatactttcattttttgatctcttttttattttcttttgtaaaagttgagttatcacgccttagcgcttatgaatacaagagtgattgtaagcatagttgatagaagcgggagccgttatttatacgttagttgagtacttgagggtcttcatcgcctactttttttccttaatatccttgtgttagtaatcatatcttcaggaaagccaagaactaatggcaaattaaatccgcggctttccctttaaactttttccagcacaatctattatgttgagaagttccgctaatttccgcattggaaaaagaatctcatctgcaaaaacgatggtttctttcttccacggaagacttatgtccgtcctctctattttcatattgttctttctctctctttttgcataacgtcacaataccctagtgctaccgtcattggcgcagcataagagtattgcatttcatgtcttcagattttgcctcgcgaaagagaaaacactaagaggtgaaaaacaataaaattatgttccagtgtgtcatacgtgaggttttatcacggggccaccgttctcattggttacttggttgtaaatgctttgcgttgtgataaatatatggcatgaaaaatcatatgacttcaaaaatgaacagattccagatgccaagcccgctttccttcggctaactagatgcgcgctcgcccttgaaatccttaatcagcacaactcaattgtatggacgtgagctctgacttttgcttccgacaattaggcctttcatatctgtccttctgagatgttatgtatcatgcattttgtatacactatgcaacacccttcgcaatggcgaaagcggaaagtcatggcaccatcaatcgtgctctgaccagtatgtaaaaaatttcttaagcctcaccatgttacagattggccagagcatctggatattcaccacacctgattgggaagactcatagttttatgaaagatttcttcagaaaaaatgacatgctgattttgtctacttgcgtgtgctttcagttctttaccagtacgatttggtcacgtgacacgcgatcaactacattcaatccatctgccccttgctggttccgagtatcaattctaaattgtggctaccactatagcaatagtacgccaagctcggatgcaaatcacggatatcttcttagcatccgagttcaacatccgagttcagcatccgagctttgcggcgaaaacttaacaagataacggataatcaaagttctctgtgatgttacggagtctttggtctgcgctgctgactaaaatagtgtgacacaacgtacatagcgccacccatattggccgataaggaccagacttgtggcgatgactgttaactctccgcgaatctttttcgaagtcgcaggtggcattgcagaaacaaaaatgtgtggcttctgaaaaaaaaaataggcaccccatttgatgtaagacatctggctaccccttgtacatttcagtcactgagcatcgaaggcacgtctttgcagcatgcaatagtgttcgaagttcttccatttacggtggctcccctcactggaacggtgatgtaatatgtagatagctaaaacatttcgcaggtccctaggaactggacgtcaagatgaataggtattgttaaaaatgcgtacctgttgaattgaagaggtcggaaaaatcaaagtacttaaacagacgattgattcgacatttagctattcaggttgcacttcttgaaggttgaacaaaacatcaagagaaaataaaaaagaaaatataacaaaaaagaaatgtcaaaagttgacgtaaaaattggagcagactcgatctcctcttctgatgaaatcctagttccttcgagactcgctgatgttacgctagcattcatggaggagaatgacgcagcagttccagaaatcacgcctgaacaagaaaaaaaattaaagagaaagctttttctcacaatattcacctttgtctctgccattaaccttttactttacatggacaaagccactttatcctatgattcgattctaggcttctttgaagatacaggtcttacccaaaatacttacaatactgtaaatacgctgttttacgttggttttgcaatcggccaatttcctggacaatacttggctcaaaagttaccacttgggaaattcttgggtgggttgttggccacatggactatacttattttcctaagttgtaccgcatacaacttttccggtgtcgttgcgttgagatttttcttggggctaacagagagtgttgttatcccgatattaattaccactatgggtatgttcttcgatgcttcagaaagagctgctgctcagccatttttctttgcagcatgtatggggtctccaattccaactgggtttattgcttatggtgttcttcatataacaaatcccagcatttcgttatggaaaatattcactatcatcattggtggtttgacttttatcatgacggttgttgtaattctgtggtttcctaataatcctgctgatgtgaaattcttttcaatacaagaaagggtatggattatcaggagagttcaggcatccacaggctcttccattgaacaaaaagtcttcaaaaagagtcaattcagagaggcaatgaaagattatataacctggttatttggattgttttttcttcttcaacagttagccaacaatctgccctatcaacagaacctgctatttgaaggaatgggtggagttgatgctctaggttcgacattggtatcagttgccggtgctggtttcgccgtcgtttgtgccttcatcgctacgttgatgttagcaaaatggaaaaatatttcagctttaacagccatcttttggactttaccagcattggtgggatccatcgctgcagctgctttaccatgggacaataagattggtatcttagcaaatatctgtatggcaggacaaatatttggtattccttttattatagctcttagctgggcaagttcaagtgcatctgggtacaccaaaaaactcacaagaagttcggtgtccttatttgcgatgggaattgctaatatcatatcaccacaaatatggagagagaaggactctcctcgctttttacctgcctggattgttcaaatcgttttatcattctctcttgcaccagccattttgttactgatccatttcatactaaaaagaaggaataatcaaagactaaaaaattatgacgaaaatttacaaaattatttggacagaattcaactcattgaaagcgaaaatccttcttccattgaagaagggaaagtggtaacccacgagaacaatttggcagtctttgatttgactgatttagaaaacgaaacttttatatatcctttgtaaatattgatgttttgttgtgtaaatgttctatctgacacttaataattagaaaattaattttttaaactttccggctgcaagaaagaggaactgtgtctctttgaaaggcacaatttcccaaagaatcatttacaatggtaaatagcttactgcttagaaaataatagataattgaataaatttatagaggaatttcttgacaatttcttcaaaacagccggtaaaagtccattaaagattagtttttcttaaataaatcacctaaactttcaaatttagcataaaaaacatgtagatatttgttctctgtactttataatctaacattttataagacagagactagtaacccctctagcctgtggttaaaatacgcaaaacctttgaaccctcaatatttttgccataataatgacaactatattgtacccatttgttcttgagttgtccgtatggatggaaagcagcactcgagtttgctgaaattacatacctcggtatgcaatatgcccagaaaatttgtaaatgataatttacataacaattcaaaacatattgatgtttttcgtgggtaaccatagttcttggaatgtcaactgagggtatttgcacttcaaaaaaaaaaatttattaaatgagactatatacagtgagcacaacctgtctaatacaacggcaaaaattatatacattggtagattttcaaaattgaactctttgtgctaaagaattgtcacaacagtttaaaaaatagtttgaattcttcaaattgaccccatattaataagacctgatgcgattccggtctcacccagattagagagggaatttaattttcttaggaccgtagctaccaaaaatctttgtgtggtattgattatatgatcgtgcttgcgaaaaaaatagaagactaaaagtagcattagtttactaactttctcctcgtatctttcaaatttgtattcccctcaaaagttactcaggttagggaaaattccaagtagcttatcaagatcaattgccattagttgattcaaggcttcattgtcataattcatgaggtcaatttcactctgtaaagattcgtcaacatcttcagtgaagtttctggaaaattcttgtgcggaaatgagtttttctaattcttccaaaatctccaaatcaagacttcccaagaattgtggattgtttaattttgtgtgaacgaaaaggacttatcccttcccataccccattttaaaccgacaatcctatggattcttgaatatctttcatccataacggcgtcactcttccagtagtcggatataaacgcagacagcgcgtcagtatccaccaaataaatgatatacctgaaaatagagacagaaatgaacgaaccgagataactcttttccagtttcgagataacaatttctacaagtaatttcatatgatatgacatcaacttgatcattttttcaatgactcgactaagtcttccgtttctatcattcaacattcccatggctgcagaggatctgtcgcatgtatccttcttataaaataatctcacgagcaaggtggcctggaatatgagtaatcgatgtatcgaaaagcgaacaactttctgagtggcaaacccaaaaggttcccgtaaatgcagaagagatccattaaagtattccgagattaattttagcaacgttaaataatcttgtatagcggtaaaagtaaagcggtgataatatgttttgtactccaaagcgtttttgaaacattgattttcaaaatgcaaagataagctatcatagatgttcattgtacaagtgtagctaatcacattagctatgaatgtttcattttcctcaaaagtgctaaagtcaaaagattcttcatttgctaaggaagagggaacattgatatgtaagctcttcatccttggttctccaagagaacttaaaatgagagggaatttctgatttaaaaaatcttttgtcttgtcgatgttatccaatacttccttcaagtaggaagggccatttattggaaaacaagaagtcagtaatacctgtaaagataaatgtaaatgatagatattctctgctgtagccatcaacgataagtctagattattagtagaagcgtaatttctctcaaatagttctggtagagattcgtcagttttcataaaggatcttaaatattccaaacttagaatgtcagaatctccttctggaatcaatattccaaacttcaaaaattgcacgccaagccataatttccttcttaaattgaataatcttggataatcgtccgattcgctgacgtatcgagtgtattggaagggttcttcattcagtcctagctttattgctacattctccaaaaattttaggtttagtatgtcactgtgagtaggatacatgtcagcttgatctggattcaaataccgcaatatgaaaaaatagagcagacaacaaagtgtatgttcattaacatattgaaaaacgttcatgagagcaagaagtttatgagcgagtagcgttaaattattcgattttacaccaaaagattctttaaatgaatgactagtacttagactcaaacgtctgtaagaaaaagccaatatgatagttagcagtgttattgtctccagttttcttctagagtctttgcccgcaaatacaatgttatacccattaaattcattcaattgcaacagctcccttatgttatcttcgaataatgatatttccagtaacggatagaccggatatattgttttgtaaaagtccacgattaagccatcaacctcattcttattgaggaaatatttggataactcttccaaaaggatgtttatggaaattttatcattattttcttcaggatgcgcttgttcataatcatacgtgttatacagaaaatctattggaggatacaatttgcttgtttttgaggtattttcaataaatttaagtgcagctttatcaataaaaaacaaaggtccaatatcaccgattgttaagttaagttctctttttttattgttggcagaaacgttttcacgatggcgttcgacatcaatcagtatcctctcatgtatgcaggtggtcaaggccttcgcatacaaatcatgttgaagaatgctatggaaggcaaaaggactatcaacgatggttgtgttattcattacaacaagcttgtcgtgtgcattcgataaattcatggcaaaatttttcatttcccagtctttagtacttggattaagtatggaagtaaaggaaccacttgcggacatcgatgcaggagtaatgtttctaatgtctctatgtggggcattttcgatagtgggagatttgttaatccgtcctggttccacttcgtagctacaaatcgaggatgaggccttgcatttggagcaagtaggccaaagtttatcacatttgattttcctttgcttacaccgcaagcaaacaaacgatggcttaacctttttctgagatgcaatgctcatatccagtgcagtacacttatcttgtcatagatttctgatgggtaaataattacttcacatcatctttgtttccaaagtttggcctcaatgttgcctttaggaggaaaaaatgtgaagaatgcatacttctgccgcttacgtaaaaacagaactctgaccagaagagataaaaacaaaaaaaaaataaaggacagtaaatatgaaaaataagatattattatattaaattaaattaaattaaattaaactacgatgggagcgttatgccaaaaaagataaaattctgagcagactactctcagtcttccttcttttgacctgccgccttttcggcattaacgtatgtagtgtaatcaaggatttgtaataattgccacactgaccaggctaagaaggcacccaaaagtgggctaatccagtagatccagtggtaatgagggaaatatctggcagcaacggcggcacccagagatcttgcagggttgacaccggtaccagtgtaaccggtcaaagccatgtgagccatgaataaagaaataccaattggaagcgcagccataaagttagtttcacgtttttcaacagcagtcatcaaaactgttaaacacaacacagcagtaccaaacatttccaaaaacaaccccctagatctggaacagcctaaacccaaagcattagtaaagagaaccttgcctggagtcatagcactagcggcaccaccagcagccatcccagcaatgatctgaggaaaccacatcactacacatctggctggtgagatggctctggccaaacacaaagagagagaaacggctgggttcaaagccccaccagaaacaccagatagaaaacatcacagagaaaccgaaaccaagggcaatcatgatcaattgacctggatgagagccctcaggctcggttgtcaaagccacatcatggttagcgacattacaaatgacgtaagcacaccataaaaacatgaaggtaccgcaaaactcacccacagcagcgataaagtggtttcttaaggtatctctgtcaatattaaaacgcgaatgcttcgtttccggctgttcaggtggaatataagcattgtcaacaccggtcgggtccaagtgcgaaatgtttttttcaaggtcgttagattcgttagacatagtataactaaggtaggctagtgtcgcttttgaatattttcaggaattgtaatagccaggaacaagaaaaaagacatgcgcacactaataagctactaaaaccaacatatttatactatcaaccgagagaggggcagatatgattcacgataaaaagttaataaaaggataacagcggcgctctaattcgttaatgaaagccatagtccggtatggacaaaaactatttccttcttttttttttttaggtttttttttaatttgcacttgcaataatctaattcactgtaggagtttaaagaaaaacatctagaaggattggaggaggtaagtcattattatggcggtgctcttttagcgggaaaaaaaaaaatacacctacgacgttaaaacagatcgtgctgtcgtctcagcggcagtaaaagtactgtagtagttacggtgcacgcagatgcaatgctaattaaataatcatgctcccatttttaagaagcagaaaaaggccgcagtaatttgagccgtgaaaagatttcggagggttgattcttaacattttccaaaaaaatgtcctttggtctgtttgcttgggtctgaaaagaaggactgcagcgccacctccactggttaaggacaaaatccatacttattccatctttctcgggacatattttcctgagacaaaagaccgtagaacttcaaagactcgttcccagaaagggatttagagttaatttttgctcggcatcaagccggaaaaattcaggcgccgcttagtaattaattgcaagtaaagaagtaccggatttattagacatcgtcttagcaagcaaattcctgaaagctaaaacgcaaataattaactaaaaatagttgctaaagagcaccttttatgcggtacataaaagtttttagtgccgtagatatatgtagatataggtgggcgtaggatcagaaggagccggagagaagatttaccaacactgatattcctcgaaatactctataattctctctgggtaaccgaggagtttttgagaaacggtgtttctaacatcgtccaccagaacaggagggccgcagcacacgaccgctaatgaatctccaggcggcgtactttttattgcgttttcaattacattgctaaaattaggtcttgcattgccgatgtgggcgaagcttgtcagttcggtcattatatcatcaaaatgtattaattggtctcgtgcgtttgctgcctttgtaacagctgttttctgtgtaaggtaaacctgcacgttgacgtgggatcggctattttttagctctagtatctcggatttatagccgttaagaaaagaaggatttttgatcgccatgatcaaatctatactcttgggtttatcagggtttcgtgacagcttaatggcatgatctaatggaccaggcaagcctgttcctccacttagtaacagcaaatggtcgaatttatcgaggtgaagattactgggcccataaggtccctcaatggccactcggagttgtaatttaccatttaaagattgcaaaatatggttataaatgaatctagtgagaccacttttaggtttgatcactaaaacacacttctcaccttcgtcgataatggtaaatggatggcattgccaaaataccaatggatgtaaaaaataaatgaaacaatattgacccggtttcgaatgccatctccggttatatttgggtatgattactttaaacatttcatcgtgcgggttgttgctggtgttcaaattgattagtgttgctttcggaaatctaaactgcaaaatgttccatattctgaaaagcttttccagcccccaaatgagcaaggataccactatccattctttccaaccgttgaaaattttgacgtgttgccaacaacagtaaaagaacaaaagggctagtatgatgtgggtgtacaggaaaaattcgtaatgtcttttccttactattccgagcgatagaactagtagaacgcaaagcactgttatggatgcaataccaaacttccaatagagctgtttgttgcttattttgaaggcatggttgataattgcgaataatgaataagaaagcgaatgtatcgttgcgtttaagaccatgattctaccgatccatttatggaaactaataaaggaattgaacttgactcctgttaaaaattcgagaaaactattccttgccgtaaaaatgataatgagagggaactgagtaaacgccagtatcccagatctatcagccaacagtcttgtaaactgcgacaggtgactgttgaaaatgaggttatatgggtctatgatgtaacttatggacaaaaatatgatgttcgccaatgtgtatccaaaaatgatccatgcctccaaggaattcggcatcagtcccgtaaagacttccacgtttagaaacttgaagtgattagcgtgcttatctactaaaaacgtaggcaacacaaaatggccccgaatataattgacgaaccggcttgcaaatagcgctcgattcaggccgttatagtgactcatatggaagaagacggcgataatacccactatgacgaagtagtaagttaaatatgcaccataaacactgctgatatctaaattataggcatgcgcatgaaaagctcgtatccatctagatcttgtctcacgatcgactcgaatggatgtcgataaactttcaatagaaccatagtcttccaaagcgtgagaagaagcattatttaaagatgagtagtattgctccagtgaaatattgctaaactttttatcgacaaacgagcacgtttttcgtacgttacccaagctttcttcgaaacttgtgttgtccatgggaataatctggtctgtaagcgaattgaagatacaaagtgaccaagtatcaaacgctggtgaataagagcatatggtagaatagaaacccggtacgacggagctatcaaatgaccacttcagagtatttatataggatgcgcatgccagcacagcgttggattccaaatggtcttttttttcagtgtgtggtaattttatattaaaagcctttgttaaagatatcagccacgttaaaaacagaagcgttctatgcatattcaacgagctatggtcgtcatgcttcactttagaagattatagaaaaatcattgctgcctggttcgatgaccttgtatcttttcttgatctacatggccagtatttccgttctgaatttagaattacaaatatgggtgcaaaaacaatgcccactagccggggtgtacgggaccttaaatctaagtattgtgttttagatagagttgcgaagagaaaattataattataataattctatacatgtattctgtatatatatgacgattttatatatagatatacattttcatttttcttgaagattgttgtcatttgtgaaatcatttaccttaatgagaaccagcgcctctgctgactctttccaaaacagaatcgtaagaaacttcggaaaaatcagtaccttgaacatcggtagagacaccgtttaaggctcttcttaaggcatccttggaggatgcatagaccatcttagatctgactggagcagtgtctggagaccaagtgaagaaaacaatcttggatctcttaccttcattaccattaatttcgtattcaaaatcgtaaatggcgtaaagacagtcgttttctggcaatttctctaagaaggcatcgtaagatgggtcagtagaggtttccttgacaacgatttcggttttagcatcgttcaatccgaataaaataaatttgtattttttacccaatttcaagtcattgaaagcggtaagggattcatcagcaacagcaacactacacagaaacttcacattttcctggcttcttatgaattttttcccccacattccttttaaagttccatgttaaaaagggaggaaagaaaggacataagagagcgagataaaacagcatcatgtcaattagttagtaattgatagtttacacaggagtacaaatgaaatttagcatacccagatctagacatcttcttttgttagttttttgtttatgtatgttttgaaatctgaagtttacgtagttgctaaccagtcttttcttgtttcctctttttcttccaattttgtcatcaaacaggggcggcgtcacccgaatattgttcttattacccggatattaggtaatttagaggtactgcatatagtataagtgattgatgaacttatagaatgttctctcgagcttccaaggccattagcctctaccaaaggaagtttgatgcctggtcttaagcttgttgaagctttagaatacaggtgtgaccgattggagcggcttataggcgccggatacagcgcgaattccgatgtttcagtgcaattagatgaactatacaatcagttacatcgtctatatttccagggtctaaagtattctcaagatctcctgcaactctttaatactttcatggctgaagacatcgagaacgtgggagctcctgatgatatttgtatttttgctagttgctttgacgatatttatacattatatagtgcatttgacgaactaaacagccaatatatggagttttgccaaatcagtaaaagttcattggatcagatttccttcaaagacgcaaatattgaaacgaaacagttgaagaagttacccgagttggtggataactgcaacataatgattttgaggtcaattgcaattctaaaccgtttcatcgactggaatattgaagttaacggattcttccagttccagaaaaagaggctgttgaatttacaaaaggtaatttatagtacgtgaacatgtgtgcgtatatacatatatatatatatatatatatatatatatatatatatactttagcatcgaaacagctagtcctttttagagttcaatttttccacaaaggcttttttagccaattcaattaggatatccaattctccactatgctcacacatgctataaaaggcactttgtttgttaagtaacaaagaatatgggtgatcatactcttttacctcacctgcatccatcaccaaaattttatcataatcgataacagatctcaacctatgtgcaattgtcaaaattgtactaccttggaactcttttcttatggtttcttggatcttcgcatcggaactgtagtcgatggacgctgtagcttcgtccagcaatatgatctttggactcctcagtaaagatctagcaaggcacatcaattggcgctgtccttgagacaaattggatccaccttcgctaatttcactacttaaatccaagaatttattaacattttcggagttagtcgacgaagcctcattgcttgtttctcttgtggcgccttgttgtaattgttcttcactaattagatttacacgtttcaaagcttcaaagatctgtctgtcactaaattcatcatatgggtctaggtttgttttaatcgtccctgagaatagtgttggatcttgtggaataatagttatagaacgacgcagtctttgtaaatcaacaccggaaatatcgatattatcaattttgatatggcctgtctcaggttccaaaaatctgaacaaggcggtaataatagttgatttaccggcaccggttctaccaacaataccgatcttagactgagcgtcgacagaaaatgaaacatttttaattactctaggtagatttggagcataccgtaatgataaatcattaacctcgattttaccgtcttgtggccattgtggtggcggtatttctttgtgttcgttgtatggctcttgctcaatttccatatattctttgactctttcaacagaattcatattcatctccacttcagagtacaatcttaccaaccacaatgccccttcagtgaaggaaatagcatacgtcaaagatataccagccatacccgaatccagattattaatattgaatagaatgaacaaaccagctccaaaaatgaccaaggatccaatcatatctatcctaaaggccaaccaacgattagcaacccacaagtagaagaatggtttattattttcatcaattttgtgtaaattctcttgcataaacctcccttcatcaccaaacgcacgaatggtggtaacaccgacaagagtctcggaaaaatgttgatagatcggtgatctagaaatagattcaaatcttttcaattcacgagaacctgccatgtagaaatacccaacaaaataatacaatattgaaacaactatagcaacagataagaactgtggagtaataaatgtaatcagtatgacggtggataaacattcaataagcgaatagaaggcgccttgtatataaggtgtcagttcctgatcaatagcttcgatatccttggaaaacctgttcataattctacctgttggagtagcatcaaaaaatcttatcttggagtgtaaaaccttgtttagaatcatattaaatatctttcttgacgcgttgataccagcaacgaaatttaaaatagttttaccagctcccaataaagcctgagcaaaaccaatgattaggtacaaaaccagataatacattgtagagtgtccactggaaggttggttttcagctgacgccatactgatttgggacgagcccctccaatcaattagatgactagccttcttggagataaatgcaatagcgcgttgtgctctgggaataattttagcaatgacattgtgtgacgcccaggcacgaacccaccatgattgtccgatatacaaaagttgggctatcaagaacaaggaagctaaaaatgaaacaatcttccaaccaccaaaaattttcaaataccatttatagacatccagaccaaccacaccttcttcttttgtttcctcttttattaatttaccatcttcagtgcgttcagcttctgtcctcaatgatttttgaagtttcttggcttcaaagtgggaggagttgttgttcacgctaacttgttgttctttgacagcgggtaggttacttaagcttgtgctactttttgcggctaagttagcagaagagtttgcacgcgataagatactacttttcactaactcgtcttcaccaaacaaacccttctgtaacatgtctattggatcaccttggtctttaaccctaccatcttctagtaagactaccaattcagcatttctcaaggtcaaggcgatgttgtgtgaaaccaaaatacatgtcctatcttccattaatggtccagtaatacaattatcgtaaatccaagatgcagtatgtgaatcaactgcacttaaacaatcatccaaaaggacatgcctagcattggaatacaaggctctagcaagggagactctctgcttttgaccaccggataaagtaatacccttctcaccgatttctgttaggtcaccggctttcaagatctcaaaatcacgtttcaatccgcatgcttcgacaacagctttatatcttgcctcattgaatggactattgaataaaatgttgttttttacagtatcatttagaagccaagcggcctgagaacaataagcgatagagttagtggttccattcgcatctactattagttcctgccttggttctagagctgggacgacaaccttaccattgagtagatacatttcacctaataatgccattagtagggatgtcttaccagaaccagtggggccaataacgacatttagtttaccagttttgaattcaatgttcaagtctttcaatttgaaatcttgattgtccttatcccaagagatggtggaattctcaaaggcaaatctgtttccatttggatctatggtcagttgatcgtatttctttgtatcattttcatttaagaaatcctgaactctatctaacgagacctttgattgaacgacaaaacttaacatatcagacaaacgatccaaaggatctcttaataacgtgaataaagaaagtgcagtaaaggcaaccggagtggttaatacctcgccttgaacgtaaatgtagtaagcaaatgaggcggctgttacaatagttggggtaacaaaccaaagaaaggaactgatagaccaaacaatggatctcattagcagtagagataattcattttctctaatagtattgatatctttttcaaaattctcctcccatgaaaagtatttgatgattctgatagcttgaaaagcttcattcaacttttgaatacgattatctgtgacagccaagtttttcttttgcaaatcgccgatgtacttggcaagcttataattcagtggaagcattgcgacaatgattaagacacccacaatcgcagcaaaacccagcagacggtataacagcgccagtgcgacaacagtcataacaaaagcctccaaaaatgaatgaaggtaaccacaaatttcagaaaccttgaaagcgtcaatagccatgagattaataatcgctccaaggttggcagaagaagtggactcctcatcgccgttgatacttttttgatcattaatttcctgtggatcctcattagaaggtttagtcttgttggtggaaatctttcttctcaaagctttagtataaatctcagagattataatacttttcattctgatacaaactctccttccaaagaatagtgcctgtgcttgacaaatagccactaatatcctacctacaaacatgacagtgacgtaaaaccaagctaaatttgagggagcagatgactgatcttcaacatattccaggatcctttttagtaaaactgttggaataaaagaaaggacgctgcctaaaaatgcccaaaagcattgtagtaccaaataattcgaaaagaaaaagaaaaggtttagtgaaaaaatacgcttccttttaaccttatggtcaacaaaatatctgaattttttcactacaaagaaagaataatcttgcatcatcaatccccaaatatccttaactttgatactaactttgtgtgctttccaaacaaaactgtctaaccaagcccagcatatgaatccagcaatagaagtgactggttctggagatggagtaatccagctgtcagttttatagatgatggcaaaattatttcttatcctcgcaaaaaagagtagcaagaaaagggcaaggttaatcgatatttgtgaaatgtaatactttctcgaaataggactgtttatatggtgaatgaaaatggaacgaaagggtaaaatcatagagataaacaaggccaaatagtttatgaacgataccgaccatagatttccgggatatttgtttatgaatttgaaattttggttgacatttgctaaacgtaaagagacaatgataaacaatgcacaccattctaccaaaccagtaatcgtaccttgttgggtgaactctgggtttttattgacatagtgtaatagtataaaagaatgtattataacttgagaaagtaccaaaaaaaattcaaggataattcttgatttttcaatgaagcctcttctaactatttcaggtgtaccatgaggttctccatttaccttaactgatttcagcttttccagagaaaagtgtctattttttagtgcgtcttttgtacaattattgtccacgtaattagttgtgatggtgttattatttatcaacggactctgttcgtcttcgtcggtagatgagtataaaagttcatcaattggatttttttgcttcaagtgtagaacgtcatagtagtaataatgtttccatatgttataagttatgaacaacaccgtgaatattaaaagcactaagggagtataataattaaggtactttgttctgccgtactgagttacgtcatcgtaaaaccaaaaccgatggtcaggtctcgttgaattgagtacgtgatgcatgttctccgtagcttttccccccttgatgagctcttctaaaaagtacaaaatctaggaaagtataatgtttcttaaatgcgatgaaatgaagtgaaaagaaaaagcgactggcaactataaagaaacaatgccggtttttcgcacttaattgttttcaaaagatcacttgtttatattagctgctaaattgtttattctatttaaaacgtgtagtaaggaaaaggcctgctctgtagttaatatattcttatctgaaaattttatatacttcattagtcacaacgtacgttctttgcagatgcgcacacaaaaaaaaaagggcaccaaaataaaggaggatgcgaaggtatgacacattttctggatacctttactggctaactattggttgtgatattttgcagagatgatgagaagtcaaagcaagtatactagctattttttttttttaattttgttttatttttgtattatctcctccttcttgtttctgttcatttttcttggcagaggctatcttaaccaacaatactctaccattacttgccttccgacctttaaattctcgacatttcttttgaatactatctccagtccccaggttgtcaaacttgatgaaggcttcgccggtgtgaaactcgtcggaaaagaaaactttgtttgttctcaaatccaccaattctcttcttacaaagtttatatttttagggtcaacaccaaagattttggcaaggtcttcatttgtcgatttcatgggaatgtttttcacatagagagtatttgtggatagtggcttgagatcaggagcagttttcttgtttgatttctggtttttttcaaaacttttttcctcttttgttaagatgttttcaataacaattttttcattcataaaaattttaccgttcatcttctctttcacttttttcagattcacaccctcttgaaattctataaatgcaaaccttttcagcggtttcttgagtggctttttctttagcatatttattgttatcttaccataatttggctcaaacaaatctctcaagtcctgtttacggcagtttttaggaagattgccgacatataatgtcctcctatcatttagtactcttttttttatttttgtattttcaggaacaactgttgttgttttttttccgttgacgttataaaactctatctcctctattagcattgcctattcttttcttaaaagtttctttcttcttaattttttcaagattacttgggaagatgccctatttccattgatttgaacgtatgtatgaatgaaaaggaagtgagaaggaacaagagaaaagaacaaaagagtttttagtttttatatttgcttacaggaacttcggcggctatttgttgtatcgtcgacagtgacgctgattctttcaaatataaatagctgccccaattagttttgcttggcaaaacccgacattgatgaactagtgccgcgcttaaaagtataatgttgctctattatttttcaaaaattcatacaaaagaaaacgggaattaagtaagtatacaaaatataattatattacgatgttcgaaattctatatatgaatttaagcggagtcggaagtcttagctctcttgtccatcttagcttgagccttgttaccaaggataccaccgccccagtgcttcttgacttcatcgtatttgtcagcgaagttagcgtcaatggtggaaaccaacttagccaaagcagcttcgtcttcggctctgacttcggtcaaagcggcaacagcagaagtcttttggttaaccaaagtacccaatctagccttacccttgataatggcgtatggaacacccatcttcttacacaaagctggtaggaaaacaaccaattcaattgggtcgacgtcgttagcaatcaaaaccaacttggccttcttgttttcaatcaaagagacaacatggttcaaaccgtacttaacagcgtatggctttggagaagcgtcttgcttagacttaccttcagcgatagcggcagcttccttggtcaatctttccttcttttcagcagcggtttctggtctgtacttgttgaacaacttgaaggtttcagcagcggtgtttctgtccaaagtgtattggaattgagcaatggttggaggaaccttcaatctgatggacaagatcttcttttgtctttgcaatctgacatattctggccatttgacgtatctggacaagtttctctttggttggacagcttggccaataccgaagttctttggagtagagtgagtcaatgggttcttagccttgttagacttagtggacttagcaccgaatggagctggagcaactttcttacctggagccatcttttctttcagttatcgtgttcactgtattgaaaaacagatataaaaaaaaaaaatagtgaatttcaacgtgcgcatcacaatacttatgtcttgataataatatcgatcccatactattgtccctggattttgagatgggaaaagtttcaatgcgttctatcgtatagtatgatgtattcaaaaaaaatgcgataattctttagttgtcggcacttcggaagccaaaaaaaaaaaaaaaaaaaaaaaagaaaaaaagaaaagggtgtctaagatgtacggatcttcattgggatggaaaacaggcaagtaaaaagaatagtaattattacaatggagaagataagataaagttagcggcaacaaataaagaactcatcagagttcttggcttctctatgagtgaaagtgtttcaaaggtgtttttttatgagacaacagtaattcccctccttcagaacagagtgtagtgattggcagtgaagctatccctctttgccacccaattttgacggcagttctcatagcatctcaaagcaatagcagtgcaaaagtacataaccgtaggaaggtacgcggtaggtatttgagttcgttggtggttatcctccgcaaggcgcttcggcggttatttgttgatagtcgaagaacaccaaaaaaaatgctgttattgctttctccgtaaacaataaaacccggtagcgggataacgcggctgatgcttttatttaggaaggaatacttacattatcatgagaacattgtcaagggcattctgatacgggccttccatcgcaagaaaaaggcagcaacggactgagggacggagagagttacggcataagaagtagtaggagagcagagtgtcataaagttatattattctcgtcctaaagtcaattagttctgttgcgcttgacaatatatgtcgtgtaataccgtcccttagcagaagaaagaaagacggatccatatatgttaaaatgcttcagagatgtttctttaatgtgccgtccaacaaaggtatcttctgtagcttcctctattttcgatcagatctcatagtgagaaggcgcaattcagtagttaaaagcggggaacagtgtgaatccggagacggcaagattgcccggccctttttgcggaaaagataaaacaagatatattgcactttttccaccaagaaaaacaggaagtggattaaaaaatcaacaaagtataacgcctattgtcccaataagcgtcggttgttcttctttattattttaccaagtacgctcgagggtacattctaatgcattaaaagacatgagtaatcctcaaaaagctctaaacgactttctgtccagtgaatctgttcatacacatgatagttctaggaaacaatctaataagcagtcatccgacgaaggacgctcttcatcacaaccttcacatcatcactctggtggtactaacaacaataataacaataataataataataataacagtaacaacaacaacaacggcaacgatgggggaaatgatgacgactatgattatgaaatgcaagattatagaccttctccgcaaagtgcgcggcctactcccacgtatgttccacaatattctgtagaaagtgggactgctttcccgattcaagaggttattcctagcgcatacattaacacacaagatataaaccataaagataacggtccgccgagtgcaagcagtaatagagcattcaggcctagagggcagaccacagtgtcggccaacgtgcttaacattgaagatttttacaaaaatgcagacgatgcgcataccatcccggagtcacatttatcgagaaggagaagtaggtcgagggctacgagtaatgctgggcacagtgccaatacaggcgccacgaatggcaggactactggtgcccaaactaatatggaaagcaatgaatcaccacgtaacgtccccattatggtgaagccaaagacattataccagaaccctcaaacacctacagtcttgccctccacataccatccaattaataaatggtcttccgtcaaaaacacttatttgaaggaatttttagccgagtttatgggaacaatggttatgattattttcggtagtgctgttgtttgtcaggtcaatgttgctgggaaaatacagcaggacaatttcaacgtggctttggataaccttaacgttaccgggtcttctgcagaaacgatagacgctatgaagagtttaacatccttggtttcatccgttgcgggcggtacctttgatgatgtggcattgggctgggctgctgccgtggtgatgggctatttctgcgctggtggtagtgccatctcaggtgctcatttgaatccgtctattacattagccaatttggtgtatagaggttttcccctgaagaaagttccttattactttgctggacaattgatcggtgccttcacaggcgctttgatcttgtttatttggtacaaaagggtgttacaagaggcatatagcgattggtggatgaatgaaagtgttgcgggaatgttttgcgtttttccaaagccttatctaagttcaggacggcaatttttttccgaatttttatgtggagctatgttacaagcaggaacatttgcgctgaccgatccttatacgtgtttgtcctctgatgttttcccattgatgatgtttattttgattttcattatcaatgcttccatggcttatcagacaggtacagcaatgaatttggctcgtgatctgggcccacgtcttgcactatatgcagttggatttgatcataaaatgctttgggtgcatcatcatcatttcttttgggttcccatggtaggcccatttattggtgcgttaatgggggggttggtttacgatgtctgtatttatcagggtcatgaatctccagtcaactggtctttaccagtttataaggaaatgattatgagagcctggtttagaaggcctggttggaagaagagaaatagagcaagaagaacatcggacctgagtgacttctcatacaataacgatgatgatgaggaatttggagaaagaatggctcttcaaaagacaaagaccaagtcatctatttcagacaacgaaaatgaagcaggagaaaagaaagtgcaatttaaatctgttcagcgcggcaaaagaacgtttggtggtataccaacaattcttgaagaagaagattccattgaaactgcttcgctaggtgcgacgacgactgattctattgggttatccgacacatcatcagaagattcgcattatggtaatgctaagaaggtaacatgagaaaacagacaagaaaaagaaacaaataatatagactgatagaaaaaaatactgcttactaccgccggtataatatatatatatatatatatttacatagatgattgcatagtgttttaaaaagctttcctaggttaagctatgaatcttcataacctaaccaactaaatatgaaaatactgacccatcgtcttaagtaagttgacatgaactcagcctggtcacctactatacatgatgtatcgcatggatggaaagaataccaaacgctaccttccaggttaatgatagtatccaaacctagttggaatttgccttgaacatcaagcagcgattcgatatcagttgggagcatcaatttggtcattggaataccatctatgcttttctcctcccatattcgcaaaagtagtaagggctcgttatatacttttgaatatgtaagatataattctatatgatttagtaatttattttctatacgctcagtatttttctgcagttgtcgagtaggtattaaacgcaaaagaagtccatccttttcatcattcaaatggacatcttggcaaagggcccagttatggaaaatctgggagtcatacaacgattgcagttggctatgccactcctggtaaggaatcatcaagtctgataattctgttttttagccctttttttttttttttcatggtgttctcttctcattgcttttcaattttaagttcgttacctttcatatagagtttcttaacagaaatttcacaacgaaaatataattaactacaggcatgtaaatataaaaacagtcctttaataataaaccttaagcattacgcgtgtattaatataataaatagttataaattgaataaataggggagagaagccaaaaggcccttcaaaaacaaagatataaattcatccttaaaaacaacaatacctgaagatactagaacaccttgtcgcctatgatggacatatatacagaccgggtcatagcattgccaatgataaataaataatagtcatagagagtaaacataaacgcctaacgtataggaatgtgtgagaatggtgagtttcgtccttgaaaataataataataatagttggtgcttttattagtgccaaaatcatttgagaggcttctgagttcttcggggctagctgtttttctgatagtctaggcaaatgccaaagatttcttaatttcagcaatagccaaaccaggattcaagccctttggacaagttctagtacagttcatgatggtgtgacatctgtacaatgacatggagttgtttagcatggcctttcttgtctttgtagcttggtctctagagtcaattagccaacggtaggcttgcattagcacggcagggcccaaatactgttcttggttccaccagtacgatggacatgaagtagagcagcatgcacacagaatacattcgtaaagaccatccagtttcttacgatcttcaatactttgtagcacttccgttccatcctttggaaacgatgatctctgtaagtaaggttggatagatttgtattgttggtagaagttagttaaatcaggtaccaaatctttgacaataaacatgtggggtaatggatagatcttgagttgtttggattcgttctggtcgatcttacatatacaagctagcgtgtttctaccgccaatgttcatggcacatgaaccgcagataccttctctacatgatcttctaaaagttagggtagaatcctgttcgtctttgatctttaacagcgcatcaagtaccatgggcccacagtcattcagatccacttgatatgactgtaaatgaggtttagcacttggctcgtctggattccatctgtaaactttaaaagttttcaatctgggggtatgcgtagctgcagctgttgtggcagtagccatacccttcttcgtcaccaaacaaaaggccttccttctcaatagcacgttcaacatccctataaatatgtatactccagtatttcaagaaagtatagctcaactatattcctttcaatcccttcctttagcctaacattttttggcattctcatagaaagtcattaatccccttatataagtttgccctttttacaccggagctaattgggccaatgcgaggccgccttttgcgcgctgcggatatttctaaggcatggtcgtgcggagctacaataatacgattgaattatagctacatagtgtacaaaagcgggtatatactttcatatgtgatcataggatagcttcacagtacttattgtattctctaacagcaatggcgatgttcctgtacaaggaccgacgttcttcaggatcgctgatgggaatgaagtattcggattgagacttgagtttaatttgaagaccggatctttccaatgtaattccctggatggaaggatatcctgtgctccacataagctcttgggtggccatttgcacctcagcaatgtgctgcatggacacaattactgctagttctttgcctggcaatataacgtgcgacaggtattcatcattcataaatactcctccattcacggtcttgagccagtattgtccttgggcctcacgtagatcataaggcttgatgatttgatcatggtccacgtaccttggtagacgcactctgcaacccttttgcatgtcaagcacagtggtggtacttttcacgccttgacttaagttacttgtaagatctaagaatccaatggctgtcttagttggcagcccaacgatacctttaccaaggcctttgaggaaaccagcggcgccttccttttgcatggccttgtatgggtccagtgcaattccgctcaacccgcttcccagtgtgctggcaaaggattgcgctgagtttgccaaggcattcctgttgtttttatttattctttgttgtaatctcctgaccctttggaattccagatcttgtgtaactgacaggcccttggccatcgaccccgtaaacttggacatactatcagagaggccaaagactgttttctttgcaaaacttagtccacctttagccagatgtataccaatttcttgaggcctatcattcatcatgtaaccttgatatggttcatagaataagtcccagacaccggaactaattgtgttgaaaagacctacaggattaccaaaacaatctgctgatcctaaaattttgtggatctgatacacgaactgggtcgtatagtgtctctcaatatggtccatcagaatgggcaatgggactcttacattatccatgaacaaagaattaactttaaccggcgcctcatttatattacctaatgtcatagcaaacatatggacatagtacaatgatgacgaaaatgactcctcggtctcttcagccaatcctggactaatttcatcggagcgtataaaggacagatgtaagacggtgggctgaatatggaagatctcgaaatatatatcacccgccgtttttaattcagaaacatcaggtaactggatttcttcatcgtacttataatctcttgaatccatgatccatggggatcctgggaattttatgaagtccatcatagcatacagcatgtcttcatctaattgtatggaaaattcctggattaataacgtaacatgtttaaagtatgggacagcctgtaaggaatcgttgactttagaaatagaacctgatatcactggatgattttcaatttccttttctgtgtaggggatttctgttggatatagaatatttgagtagtttcctgaaaataattgattatctatttgcatccatttcattttccaactgaaagtctggtatgctttagattcattgtatcttaattcgatccctctcatgttaatatatagaagttcctgtaaacgaccattgattaatgagataccaactcctttgaacgaaacaactatctgtgtattaaccttctcatcctcatccttttgcacaaagccatcagtcactgaactatttactgaaactgaagacgtggtagttgcagaggcagttttcaatttgtataacccaacattggccttatagttaacaataactaaggcctgcatatcgtcgtcagcaacaacatgtaatccaacaatgggggctggtttatcctttgaccttttatccaggcgtaacggtggcaattcgccaatctcagccaaccgaacttcccttgtacgtgtacctgattctaacaccagatatttctccttagctgtaggaaaatcccatgcgtatggcataatacttttcgagggaatcctgtaaaagataggtttgaaactacggcttgaggactcgttagactggtcatccttgtatggatcactaactttacgaggatctctttggtaaaatataaagtcatggtcgctgaaatttcttatggaaaatggccatctgtcaccaccgtccttgattcttatgaatattgttgctttgtccaaaagaatttcaatctttaaaagcttatggcgtgaatttttcaaaactttcaaatatgttacaccgacatttttgataaagaatggttgtgaccaattggagtctccgcctaagaatttcagcactaattgcttgtcgacgatgtttctcatcctgtataaaggcttagtgatgttcgattctatttgctggacatccatagaccctgtctcgcaaacttcaatagggatatctaaagtattgcttataatatacctaggtgcaatctcaataactttacttagcaagtacttccctttaccttcgctaatgttgatgcctaaatttgattcttgttccttattttttatgcgaacagatgcatcaaatgattggccaatagcgtcaaatgataatttggaactccactctgattccttgaacctaatacgagctctgttacttttatcatcttctttatcaaatgaaaacatttttggaatagtatatcttttttcgttttcaagcaaaatcttggattgtgcaatatttaagagactactttgaatgtagagttctctatcggtagagttcataataatataaggggagtatatccgaataactttggaccttgtaccatcgatgtttttataatctagtttcaacaacaaattctgacctccagatagggtcaaagacaacgaatcttctgggtttaaaggacttttatgtggtgtattaacgatggagggctttgaagcagaagcctcatcttgtaatggttgaacagacattagcaggaaactatccaaagaaatatgatgaacttccatactttctccagtcttcaagaaatctgttctcttctcctctcttttgtcaaaaatagagaagttaatatctgctggaagtaaattttcaatagtcatagatgccgaaaccacgattttcatatgaggaaagatctttgccaatggttctctttcatcatactttgcaccaatttcgaaatgaaatctttgattggaatcttcttttgaagaacagaatatagacatttggttgctcaacaagcttttccaagataacgtctgttgagaccaatcgtatatatcctctgatgcgggtcttatcctaatatcagaatcgtaggcatattctacaggaacagatttactttgatgtggtttaatagcatattttaaagatggcttatttggatctttggagtcaaccaaaagctcaatctcagttgaagttgtgttttcgataactaaagttgacctaaacgtaataatcttcacgttattctcatcacatctggcctcacaaacaattctattatgcacattatttcttggtgggctcaaaacatgcaagttttcaccttctgttgtggcatcaatattcataatggttttataattttgcccagaaacacaaacacccaaaatgttcttcgacttatcaatatccaatttctctctaatacttctccaatcttcaaattcccaaggaagagaagtgtttgcttttaagagcacaacttcgtttttgttgtcttcagtcgttttatcctgtatccagacgtcaaaatctaattctgtatcgtttaccagttgatatggcttctgagataccctggaagctaagggcagctcttcggttagagacgccgggatgtgagaaagcatagcgattgacctagcagaaagtgtaatttccgcgattctttgagttaaaatatcaaaagagaaagcaggatccatttcagaatgcccttttgataggtggaatgttattggaatcatctccagaagtggctcccagctagatctcgaatagttgaatatgttaacataggtttctagagaagcaagagcttcaaagtcggtagaccaatcctttgctgaagcagtgatttcatttacattcatgtccaatattggcatttcatggacgtcaccaattaaaataaatctcagtccgcctaagtcagcattgaatgtttcgtttttcaaaattgcagtaggcacttcaattgattcggaatctgagctctggctagccctgctgcgctcacctaaaatgcttggatccaacaccgctaatttcctttcaaattcatgagaaaattgtattttgtctgtgctctcctcctcctctccattatcctctttttccgtcatcttatttagcaatgtggtaactcgtttgaatattaacatcgccagacgaatatctctaagtgaaatacgcatcaacaggggctgaacggaaagctgtatattcgtcattagggtctgaggagttgagtttcttttatcaattgtcaaggaggatgaaaagtcgtccaataatctcaatttttcttcagacgaattcattttgaataggaagataccaacattattggctgcaactgtcataatattctgatcggttactaaaaattgtcctatcttgaaagaaatagcctcactattcatgtcgcaaggatcagcaagtaagatcagagccgtttcgatgatattaacagagtattggattttagtcacatcaccaccttcttgaacgctttcaacaatagccttgttttcaggcttttggtttgtgttttcaggatagtataaattgttttcgtggcttttggacataattgcatcaaaaaattctttgagagaaaccaaatagtccattgccaaaatcattttcggactgtccattgtcatcgaaatgttcaatagccgtccgacctctaagttctttctggaaatattagccacaaattgatattctttattcttactctttggtattagttctgtatgcttattatcttttatattacgaacatcttctatccggaaagcagcaacatgtgcttgaccatcgacggtcccatcattctttaaaccaaggctgcacccaatgtcttgaaacataattcttgtcagaccacagtcattcaaagaagtgacgccctttgtcttgttatataaagtaagggcaatctttggagctttaaaagaaaaatccaagtatttttgttctggattttttatattgcttttattcgatccctgtagagactgaggagtagctgtgcgttcgctttcgctacttaaagaagcagggtcaggagagggacttttgatctcgccttttcctcctgattcaccagagttttcgtctgtgatattgaatgcagaggatactttattggaaatttctaataagtaagtcagctggttctcagtcaaatccaacgcaaatgattcaaaattactcgttactttaagttctggagtgtcatcttgcggaaggggatctctgtctatattgaaaagtaaacctatattttcaactagatacaattgttgactggaaccatcgaagtttaagttcgaggataattggccctcgcggacaccaagtttgatatggtttattttatgagattcgtctattaccgaaaatttgttttcaataaagaactcacccaaataaaaccgcattgtatcgtaattgttctcttgtgtgcctactaatttaggaaactggataataggtgccttgattactatgtccattttcatgttatttacggcgtcaatggaaggggcttggttgtacgctgcaagacgagctctatcaaaggatactttagatttttgaaatttagcaaaaaagttaaccattctgttaacagcactttcgataaaattaacatgcatagagcccgtagaatattttaaaaacgaatcataatctttggtatttgtagccggatcgaatgattcatagctcaattcgactagttcttgacctttcatttgaattatttttctaaataccgaatccctggaaaacgattcatttgtttcatcagtcaactccaacccgcctaattttaagttaatgttgtatctttccggtagtaaaaccattgtgaattcaccagccgatagaactaacgttgccagctttatagaatcatcattaaaaataacattgacggcctccattttaattttcatattgattttttgtggcgcatcgtccctatcttctttattatgtctcaacacatcagccggcatttctggagcgttaggatccgtaaaagtaagcattgcataattcattaaagttaatacagatctaggtgttaataccaattgcaattcactcatatgcataacaatatcttgatcgaataattcaatcaaagtatcgttatgaggcacaattctctgcactctcttgtattttagcgtaaacaaatctttttgagatcttgtcactttttcaacgccggatgatatcaagtttttgaattccttgttatcagtcagctcgatgtaatcttcaacatctaatgaatgtactcttagatctaaattcatttctttggctctcttatcaaaattgaaatttagcctttgacacaatatatcaaccaatttttcgctgtttctggaatcatttttgatacattgaaagaatgctattttcgcctgatcgatatcaaaatggagctctaagaatttctgttcaatttgaagcggctgcatattttctaacgctttcaaagtattcttcaactgcaattgaatttgcttcttcatttctttttcggaaccagaagagtaattaacgtaatcgccgttgttttcttcatcatcaatcatagaaggtatagaattagcaatcaaattcataatagtcttgtattgaatgtcatttatggaaagacttaagcgaggcaaatgaccaaaaactcttatcgtgggtaatttatatgctttaggaaggattgatagatctacagttaactctaatttcattttatccaagattctaaaatcattcgtggaagaggcggtattgatcttacctatagtagactgaatatcaggaccaacaaatatctgagtatcctgagataaaatttggaacctatcaaacattaacctattgatttcgttaccgtcaatcttgtcatattcttccggcgataactcttttatttcctttatcttctcctttggcactaaatcactgagtatagacatatgaccggcatcaatgatcgcacaaggggtatcccaatcatgtgggtctaacggtaatatgattaatggtgcttgtaaatctaaagatacatttacggtcttgtggtcttccaacaaagactcaatacccattcttgtttgtgttgtccaaccttctacagttgcctcggcggcgtttacgatattgccgattgtttccatgtgttggtttgacgccttaaaaaacttgtggacctctgtaatgaaatgaacgtggtaaaacacagtcattcccaataacttaatgtttaagttcgaatctgctaatccatctagtggattcaattcaaatgaagcacgtaataaaggttcatcctcttcttcttcctccccggtagcgtggttgtcaattgaagattgatctttagatgagtttctgacactaatgatatgtttatataacgcgttgggtgagccatcttcgagactgaatttgttcaattggaaactcgataaaaatgaatcaggtctttgagcaaaatcaactttacaattttcaaaaattatggaacccaaatttagattttgcttcttctttcgtatagtgaatgaacccttttttaacaaactcgttacacgaagttcaaccctttctctaggaacttgcagtacaggacctttatcttcattctcgtcaaattcaatagcatcataaagctcctgacgctgttcttcagtcattattaaatcttcgtctacttcttctgtaggtttaccgttccaccaagaagagagccagcttccattatttttagttgcggacttgttggaagtttgtggttcaatatttgagctagctgttggtgtgggtgagtcttccgtcatgcccaacttatattgcgcgtactgtctcttagcgacagatctgaagagaataatttcatcatacgttaaatctttatgcaattcagataattgagcctcctgaatggggtcacgtagcggagcttctaaattttttaactttaacttttcaacccataattttgtgtacaacctccgttgttcacatttctccttcatgctttcccaagtccacattttgtttttttcatgaatttcattaataacacaagcagcaatgtatttaaaccattctgtcgggttttcactaactgcgaaggatggtcttgctttcttaaactttttggtaatttgtcttaactgtatactggagaggacatgcaagatatcattatattctgtatcatctaattctaaaccaaattcatcataaaacatttgcaagtcaatgtgaggttgttcctccgtggaacccagcttgttgatactaagcttccctagcccgctaaccggtttcaaaatgtattgatgcttgggggcagtggaatttttcgatgcaatcatatctttgaaaccccttacaaaattttccaggcttctatcttgatcatcatcagaaatcaagggcggagagtctgtattccaatacaaacagagtgaatttaaagtcaatagtttatgcgtgatattctgtgtaatatcaatgaaacttggagcccagttggaatctgtagatacagctgatagctcgttcaaagttaatccaacggaagatgggcctgtagtgaagattccgtccatgtcctcgtaccttaaatggatattttttatggtaacttgtaaattgtctatgatctttgtagtcaaagactgcataaacccggcgttatttttttctgaagaagaagaagaggttttgttctctgattgggtactcagtatgcgagcctgatttgtcagttcccattcacttaccttcctcatcttcaaccgaaaagctctctttatcatctcctcatcattttcgtgatcttctgaacgtggtgagcataataaataacagtcctcgataatgattttcacgggcttattctttaaacttgaccatgggaccgttaagaccaaatcacccagtatccctgatttcacatctatgggtaaatttaatgagtccaaacagtcttttcttagttttaagttttttaacttcacatcaccactccatatgccgacatttaattgattagggtcgaaattttccacatatgagcctagcaatcggtttagcaaattagcagctaaagactctaacatttaactgttcttaattttccttttttctgccttttcccttttggtagtcacaatattctatccgtatcaaattaaatagagttaaaaggttgactcaattggtcggcttatgtgcgtttactggagattgaaacatgataggacactataaaggtggtttatattccctaataaaaatccctttctatcaaaatagctaatggtattacccggcttcgcgaaaatagtgaacgtcatagtataagacgattcaaaaatccaagctcttgaaaaccaacatgaataaagacaataacacagttgaacaatttatttagtgttctatggagtatttatcaaaaaaaaaaaaaaaccaaaaagaaaaaaggagagtaaacatatatatattgacataatgaaaatattgcgaggactgatcagttaccacccctcaacctcaagacaaggtgaagagtggactccttttgaatattgtagtccgacagcgttctaccatcttctagttgcttaccggcaaaaatcaatctttgctggtctggaggaataccttccttgtcttgaattttcgacttaacgttgtcaatagtgtcagaagattcaacctctagggttatagtcttacctgtcagtgtcttgacaaaaatttgcataccacctctcagtctcaacaccaagtgaagagtagattccttttggatgttgtagtcagacaaggttctaccatcttctagttgcttaccagcaaaaatcaatctctgttgatccggagggataccttctttatcttgaattttacttttgacgttgtcaatagtgtcggaagattcaacctctagggttatagtcttccctgttagagttttgacgaaaatttgcataccacctctcaatctcaacaccaaatgcaacgtagactctttctgaatgttataatcagacagcgttctaccgtcttccagttgcttaccagcaaaaatcaatctttgttgatctggaggaataccttccttgtcttgaattttcgacttaacgttgtcgatagtgtcagaagattcaacctctagggttatagtcttacctgtcagtgtcttgacaaaaatttgcataccacctctcagtctcaacaccaagtgaagagtagattccttttggatgttgtagtcagacaaggttctaccatcttctagctgcttaccggcaaagatcaacctctgttgatccggagggataccttccttgtcctggattttcgacttaacgttatcgatcgtgtcggaggattcaacctctaaagtgatggttttaccggtcaaagtcttaacaaagatctgcataccacctcttagccttagcacaagatgtaaggtggactccttctgaatgttgtaatcagacagcgttctaccgtcttctagctgcttaccggcaaagatcaatctttgttgatctggagggataccttccttgtcttgaattttcgacttaacgttgtcgatggtatcggaagattcaacttccaatgttatggttttaccggtcaaagtcttgacgaaaatctgcataatctattagttaaagtaaagtgggagggagagttcgagagttcttgtcgtattgtagtagatagaagatatacttatccttatccgtacagttcttgctctttctgaagtagcactttcggaagaagaaagataagcaggcgaattcaaaggtggcaaaacccggagcctctctatatatacccccaaaaggaggaaccgccctcaaatgacactgaattctaaaaacaactgataagtggcatcgcccctgaaaaaagaaacgaagtggggtaaccaccgtgtgtggccggatgtacggctgtgtgatgctccactgggcggctatttttttttttggtaccgaaattggtttatccaggattattctagaacgttctagaaacaatactgaccacaaagacttttcggaatagaatattgtcaaacaagaactttttcactttcttttcataaaacgtcactttcatcacttttgcaggatttcccacagttcgtttaaagggacatttcctatcatgggttgccctgcgcgaataagatgattggtcaaggaagactctaaaatcatctgaacgggttatttgaagacttgggtctaaatgagagcttgcttattccacccgccacgccgggcgtatcttcactgtcttcttcggccaggggatccaaagagaatcgggcatattcgtgcgtattccttgtccgttgtctctggaaatctaagctagtgctggtggtgggaggctttgctttcttttctaagctttgtcgcgtgagctcgcttctcatttcctccagcttcaaatggctattgtccgtggacttcctgcccggagtcgatatgcttgagcggaattgtattacatccttgcgttgtttttctagtaacccgtcgtcttgcagcagccccagaacgttcctgcttagcttttgaatatcttccgccttacgttcatcccgaggatcctgaacctgaaaatcctccaggatctcaattagtatcatgtttcctttcagccacttgatgaattcattggacccgttattcatcagatatgagaccaaagtcagcgtcttcatcacctggatacaatttcgatgagaatttcttctgttctgcccaagtagcaatcgcttccggattacctggatgatttctcgtactgtcttggggctgtaggtcaagattgatatttcgttcataagcgtccccgttgctccacttgtttcgtcctcgttggtagcctgtttcacctttgattccgtcggtgattgaataaaactcttgaaggtatctaacaaaggcatcacgaccccctcactatatgtgtactcgttctttgacacctttatgctttctaggcttattcaacacataacctcaattttcgttttctcattcttttttctttttttttttttctcactaaagcgttgtcctagagatgtaaaaagagaaggaaatgaaatttttactggaaatgttactactattacacaggtttatttagaaagtacaaacgtgtcagcgtatttagggtgtcaatgcaacaatattgaaactatcatttgtcttcagaatagcggcaataccaccatctccgcataccacgtccatatcagtgaaatcggcagtgtcgctttgcaaacagagggcgctctcctcgtctttagtccaattttttgttttcttgtcaaatttgtatatcgtcagcgaattgctctcgtttgagtatgcaatcatattctttccagagtcgtcaatgtcataggtaacggtgcccgtcttgaattctgggattgtgtaagttggatacgctagcgtgccgacatcctttcttaggtcaaagcaaaccacagtttggtcacactctactaccatccagtacccattgtctgcaaatttaacctcttttatcttggcttcttcatctacggggaatctagagcttgcctggtcaggtgatgacaagttgtaaacgtctaatataccgtccggagagtaaagggctaataataatgaatccttatgtaggacaccgctgctgtactcaacatctgatttagcagaatgaacaatatactgggaatcatcctcgtaggattgaaatcctatggttcctctattatccgcccagatgaagtactctgtgttgacctcgttgtgaccatacatatatataatctcattggcggaatctacctctatttctctgaggactttgtttgtttttgagtccaatatagttatttggttacctggatatagtagtagcaaacgattacaaggccctctggaaataatagctggatgctctcccccggtacggggatttggtgtagttattgtggtaatcgttttcgaatcttttaattgggtaaaatgtaaagcaccatcctcacagcgacacatgcacacccatttatcatagtacatagatttgttaagctctttatatgggaatgttttgatgttacgggagtaattttgtgcctgtaatagctccaaattttttaaaatcggccatttgggtgctttgagcttgcccctcgctacaaagtctctagaagattgtaacagcccttgtaaaaattcttctctcgtaatagctaccgcttgctgtgaggatttgggtaaatccttcgaatcttcgtttttttccatcaatagttgcgcagcgaccaactttgcagcatctctttcgtacattacagtcgacagttttttcgttaaactatctagagttgatcgtaacttaaagttttcgagcattatagcatcccattcattctgtaaacttgtcaacagattcggaatcgaataattcgcttttaacgtagcagagtttgtagactctgttagtgaggcttgttgcgcactaggtacgatttccactatttcttcgatgcttaagggctcatttgttatcggatcattccccgtatctttaacatactgttcaaggagcgacttttcaaaaatagtcctggatttaggtgatagaactggccttctaggaactttcccactaatagcacaaagcattgttccctagttggctttcttggctatgttttggtctttaatatttcttggaaagtttgcatctttctaaaattgcccttacgaatttttcaccgctgctacccgaaaaagtacgaaatttatcaacatgaaatttattcctgccaagtcatcgagtgctctgcgcctaaggcttaggttgcatttaagttgtcttaattcacgcttatagtgcaggtagtataggttccccactcctgatctttcccttctgaaataaggaaagactgcagtttagtttggcagagagaagaagataatcatttctattatattctaccgctatggtgatagattccaaacaggatctacctcaatataccaaagattcaggttcagaatcggactcagactcaagtaataatttcattgtggaatctccgtcaattccatcttcaaaaagtgcaaccgtagttctcaatagtgaagagtatgaggacgacgaaggtgatgacttgaacgggctggatgctgaattgatcgataatataacgtatgaaggagatgaagatgaaactatgtttgtggggttgaaagaaaaacagaagttacatttatctggtgttttccggctgcaagtggtgaaaggaggtattgtctacaacaatgtacactataacgcttcgagagaaattttaaccttctggcacccgttatcacagtccatacctactatagatttttcgcactttgcaggctggcaagacactttttttatgccgagaaacaacaggtttaaaattagagatgaagaattcaaatcatttccatgtgttcttcgcgtttttaattctaatcatacgggcttgttagaagcaggtcatttatatcgggatgttaattatctatggaaacctaaagaaccttactttccattaaacgagagaacaacgtatcatttattacatgagtcagaccgaattcaatctttatccgtgccgggatattggtcaactccgttagagaagttatatttgagtcacaagaacgctgcgtatgatacaagaatcatggtgattggtggtaaaaactctgggaagtctacattcttgaggcttttattggaaaaatttacgcaagatatacgagattctactacgagccaggaagaattggtatacctggatttagatcctggtcaacctgaatactcactacctgattcaatatccctgaataagattctttccagccctatttctctcggacaacatctctgccaaggttcaaatttccaaactttgttacagttctacgctggctcctcttccccgcaggacgagcccacatcatacctgaactgcgctgataaacttatagaccatttggaagagcaagccttcttcggaacgtcattgcttaatctacctgggtggataaaaggattcgggatgcagattttaaatcatataataaggaaatataagcccactcacttattgtttttggaaacagctaattcgaaaagacacctggatgaactaacaattccacagagtttttccacatcactacgagatgcatatgcacctgaagttgttcgcgttccagcccatagtctgaaccacaccttatcttctaggttccatgcatcacaactgagaacattcaaaatactggcactgtttcataaaataactcaatttgattatgattttgcgcctcttttaaaatctgcacctttgcaaatttcatatggcaaaggtaaaagcggtattaaaggcattcaatttcctatggaattccaggatctgaatcctcaagatatcaagtccgcattggaaggtactgtcattgggatatatacatattctggagaagactcactagaggtgaaatccttgaatacctttcccatcctacaatcgtgtacttcttcttctaaaaatttcataactctggggctgatacactctattgacacctcccagcaaataatgaacatttacgtgccaccttgccatacccagattttagataaacaacctgaggatgctcaatggataatagtaagaaataagacggaaactcctttttgtgactttcttccatccccccgcacaattacatgggatgataatatacaaataccgttcgcaacttttgaaagaaggaaaaaattggaacatgtgtggaaagttcgtaagaacgtcatgagacgtggccaattcatgaaaagatagaaagaaaaggtaatcgtacattttttaatagtgaaagatagaggatacacaaaaatcatgcaaagttttatatatttgttatgtatactcatattccttcaatatctaagtcatactaacttctagggactttaccaaaatattatttataaatttattgtttcatttcttccgcatccttcatctcctccgttaaacccattttcttatttaatctatcatatttcagtctatctttatcgctcacagagggtttaatctttcttaatgcacttcggaagtcagacatggtcacaataatttcttcgccagatacgccaaccgatagatcctcaaattccttgtctaagtcattatcaagaacagattgtatttcttcgctctgaaaaaacttcctttttagagccaagactgaactctccctgactaaagcagccaagtcagcgcctgaaaaattgttgcacttctcatttctgataatttcttcaaaatcaacatcgctactcagaggtgttccgtgtgatttggtcaaagttttgataatatctagtttttcctcagtattaggtaactcaataaacaaactcttatccaatctgcccggtcttaacatagcaggatcaatcatatcaggtctattagtggcgccaatcacaaaaattccccttctatcgttcagcccatctaattccgttaacaaagtgttgacgactcttgaggaggattcggacaaagaagtatctcttcttggcaccaaagcgtccagttcatcaaaaaatataacacacggtacagacgcccttgctctagtaaaaacttgtctgatggacctttctgattcaccaacgtatttatttaataattcaggacctttgattgatatgaaatttgcacgagattcattggcaacagcttttgctagtaacgttttaccacaacctggtggtccccacaataaaacaccaccaggggcgctaattcccactttttcataaagctctggtctcttgatgggttgcacaatagccatatttaattcaagtctaactctttgcaatgcgcctacattagcccaagtaacatcaggtaccgtagcgaacccttctctctttgctgttggttgaattgttggcaacgctttcaaaaaatcttcgtacttaatcgataataatgataactgctctcctgataaaggctcaggataattacgaataaattgttggactacggataaaggcaacggatcgatcatattcgcagtgttcttcaggctagattcatctccgtttgctgtttcatcaatttccatgttatcttctgaactgtccgttgccgtagttggtgtggattttatattagcataggtttggaaaattcttttaatagcgcatgtaccggcagcagtaactaaagcctttaaatcagcgccaacaaagcctggggttaattttgccaatttggcaaaatcgatagcaccatcaatttttaggttatcagacattttctttaaaatatgtaaccttgagacttcattcgggacattcaggcatatttctctatcgaatctacctgctcttctcaatgctgcatccaaagagtcaggtctattcgtggcacctatgataataacaggttttccatttgtcttttccatcgttaattcatccattgaggtcaataattgggcaactattcttctctccatttctctttgggctcctccatcacgttttggtgtaatggcatctatttcatcaaagaaaacaagacatggtgccaagcttctcgcttcatcaaacaaatccctaatctttttctcgctttccccagacataccacttacgactgaaggtgcagaaatagatataaatgggacttgtaattctccagctaacgcattagcaatcgacgtcttaccgcaacccggtgggccatgcaacagaacacctctaggtggttcgacacccgtggataaaaatatctctggatgaagaatgggtagacctattagttccataagttgtgcaacgacatcatccataccacctaaggatttcagagacgaattaggtggagatctatcttccttgattttttgacgttttaccttacatgtaccttctttggatctttttttagattttttaacctcttctgtcttaggatcatcagtttctgttatagactcggaaacagatccagatttggaccacgtgctagttatgcgtttgttcatctcatttgtgtctcgctcaatcatcatatttttcttagctagttcttcttccaagcttggtttctcttcctcttcgttgttgtaacctgggtaagaaccaaattcttccaattctgattcaatcacgtcttttagcatgcggtcaattgtcttttgtaagacaactttcttaactctttgaagtgataaatctttagtcaaacaaaaggtaaaaatctcacctgctgttaaatctttagcgaaaaacatggattcaaatatatcctcatcttcttcaccctcgttgttctcgccctcttctccttgggattcttgtctcagagacctttttctgtccaaagttttttcttccaagagacgatagataagatcgacgatcttgttatctagagaacttgttaatgagttctttttcgactttactttaaccattattccagccttcccaccacgtagctattatcggccctaatgatcttttattctaactgactcgcagattaattcacacatcggttgttaatcattgtttgaatttccaaaatatgcgatgagctgaatgaaaaattttggaacctgtcactatcgacgaacatcgaagtttgccatgacaaccatatatgaagaaagcttatgagactagctcgagtatatcatacgtatgcatgttaatcgcagttaagcggataacacaatgcgtaagccttctattacgataacaacagcaaaagctattataactccagactatactcttattaaatcgcattctaaataccaacttccttcacgttttcaaaagctagatgcagactcacctgagagaagtacagttgttaagctattttaccgccgatttatgaggcttaagcctttcatatcgaatgtgaaaatggttaaagatacttacagggattatgttcgatataagtttatgaaagaaaactacgaactcaaacgatacttggtattcaatcctgatggcttgaggtcgaaaatcaatcttgagcttctcagcaacacgaaatgttgtgaaaggatactccccgtgactgagatgcaaagaaccttggaatttgttctgaagagctgttcatacttgcccgaaacaaaagttcaaaagtgggatattgcaagggacaacacatattgcaggcaaattttaaagaaccttttaacaatgcaatatgaaaagtacagatcgattttgcatagaggaataggccatgatgagcttgacgtcaaattctctcatttgaaaactacttctagtccgctaactaagctaaataaaaccgaaaagaaaaagattccgcttttcaaagtatttagtgatttcgatacaacattgatatatctcaatgagacattaggtacaaggttataaagatcattatcgtaaaagaggagcggagcggagctttttagtatgtatggtaaaatatcaatcaaatactgtaatagatgcggatatgcgcaatgacatattttgtggtgtgcatatccattgaaaaggtgcgtagaacgttacaatactactgaacttttttccttctcattttctgccattttgatatttatgcctattattggtttgagctttattagagttggcataattataatcgtactcgtatgtatatccgtatccatacccatatccgttgtaataagtgtttggtatatatcctttgatggcttgggctcctcctaccgtcgttataacaggcattttgtggcgttgtggtgaggctcctgattggctggtattatcgatggtcgtacgacttttggcattattcattgatctgaaattgccattggtattgctattactggtgttactcttgctggaggcagaccctagaacaaattttttaattatttttttaaatattattttcgtcttttgtgtttccaaataattggatagtaattcgattgcttttgttagagtattctcattagtatccttttcaaaagtaaaagtgataaggtccttctcaaaagttacaattatgttcataatttgcaaaaatggaacaacaattaggttataaaattcgtattctttattgggatctatctcttgatctattttgaactcgtattcataaccaaacgcactattaaccaattcgttagcggctcttgatgcattctcatcatttccttgtatactcaattgagatgttccatccaagggctcttttaacggtatcattatgtaaacattttcgttcttttcgatttgtcctataatattcttttggccgttaacatgcaaaatatgtctatattgcccactagaaaatctaatgagcgtcttcgattgtaaactatcatattcttgaacaatttgttttaaatcattcttggctaggcatatattagctttgtttttcctggggcacctaattatcacattatcatacctgatcatagaaattttattttgtggaagattgaaactattggaaaactgaatgaagacgttatgctttctcattgtggcttgaattaaggaaccacctgtacctataatcggtctgtgacaaacttcaggaatgaagaaagattcttcggcaggaaattcatttataacattcttaaatgattccttgaaatcagggaaagagtcactaaccaaatttaaataaaggttatcatcttcctcttccatttccagttgaattaagcaagcagatagttccattatacgtgttaatttaccatttttcttgcctgatatgaagtcttcaaaatcaggatgtatctcgaaaatggcttttatctgtcttaagtttggattaatcacttgatttgagcccataataaaatcagataagtaatgcaatatggaagtatcggacgcctcatctgtggaagattggttaccaactactattaattggttgaaggaatcctctttgggagttattactacaatttggtttccagtgtgtccgaaaaagctgtcgattattaattccggggacattgcgcagttttcattgagtgaaatctgtacttctacaatttcatgtaatacttgaatagtgaagttcttaataaccatttctaataagttcgtggaaatcgattgaaattcaatgtattcgttagtaactctaataagcgattggtatttcaaaattaactggtttaccttttgttggtagtattttcggataaacagtagttttcctggggtaatattagtcaatcgacgataaaaaaaactctttgaattcacgcttatggactcacgtagagttttcctagccagtaaacttagtgaatggacagcgcctgagaagaagatttgtggatttgccttaagatccctagacagcgtaatgagggaaggtgcgtaaatgctggttttaaaagctctggatatatgtttgaagttttccatatctacacccatatataagggaagcacagagtatgagttcagttccataggttcgataatgtagtgttgtggaggcaaagtcataccattcttctttattaaatcgacaaatgccaataactggggttcgcattccattaaattagatcggaatcctaatgcatgcacgtaaatacataattccttgctctcgcctgtctgttctggtgtgaagtaagctggttctttggtgatgattagttctaaattgaatttttcactcaagtccaatagtatacgtttcattttttccaattctgctgttagatcatttgtgttcataggtaagggcaaagaaatcctgcaaatagcatcgaggtccatatcatctgtggtagcttttattgagatcatgtcatctctaatgaaagaagcatttagattgacccatgagggatctatatgacagattgcttttgtgtttttaagttctttggagcttattcttttttgaagaaattcaactaaaaaaggtgcttctatgggcttccataatctatttgtcgtgtataagtgtggaacttgtaaaaaagcagttgtgataactgtactgtaaattttgaagttatccatgcctcaaccgtgtgtttactgctgtttttctttttaaacaattgtgtagacttaacctctgcgggcttgaatagtgcttcaaaaggttcaggtagtcaagaggttagctatataaacaaagatgacttttcatcctttatttcttttattttgtttttgttttttgcctttgtggaaaaaaaacaatctacaagcgaaaagaaaaattttggagaaaaatataatttaggattacaagaaagtgatagaaaaatgtacaatcttaaaagaataaagctgcagaaaagagatgcttttgctttcaaatttttgcaatatcaagagatatgatttacttgtatctaaattacatgtagatatatatatatagtatatttgtaagtaaagagtggaaatgaagttcgtcatttccaaaaaatgtcatttatgtgcttaatcaatctcccactagcaaatgcaattgtaccaaaagtaacgaccagttgagtgactattaaacttaaagaagcaaagataaaccttgggcagaagattttccaaaccatcaagtgtctacggaagtgagtaacccaaataaaggagcttagacataaaatagtattgtaagtgagtaatataccgcagtttgacacaattcttcctaaaagtgtttgtggcttcaacacatcaggaggctgtgaccacagtgtcagtaacgctacagataaggagacgagaatatgaggcccaaatgtatttaggatgatggctatctgagtgaaggggaacgttaccttttcagacagcataaatccgatatcccattgcactgatggaattgtggcttgatgaccggtggtgaaaaaatgttggtaagataagagtcccaacgcaattggaccaattatgttttcctttaattttaaaagatcgataatttctaaaattgatagtagttggttgcacatgaggaagtatgacaactgggccaggggtttgttgaatagtaggatactaatgagaacgtttatgaccaaaagaaaaaactctgagccgtaaatattagtataacctaaaattgttgcttcgtgagacttaacatcagtattatgaatgtttaatttaatacaaagtggtcccattagccagccgacattagaagcaatcaatgaaaaaccggcaataattctagccaacgtaaatttaaaaatagtgacgtcccgtaagaacggtattgctattaccgcactgttattttctaatgaagtcaatgaccaataaacaaagttcaaaccaaggataccctttaggaaaacgtttatccaaattggagctgcagcttgataagacgatgttagattataataaccggtgatgcatgcaggtaatatgaatatcattaggaaacagagacccaaaacccaccacgaggaattgttttgattattaaatgttggaatacaatattcgccttgttcctctctacaaatggtaatcatagaagctaaccgggtaaaaatgattaaaactgcagaatggtaacctcctagtaatcttgcaaatcttgttaatggtaagtaatttgaatttgctgtcgaaggattgacccctgaagtggttccttccttttcactgattgttgcagttaataatgcagtggtggattgcctttttggtaagaagacaaattcatacaacgtcaacatgccgaaagtagataaaaggaatgctacaattctatcctcccaaatagtaaatgaattggaagtgaaaagcaaagcatgaataatcataaacatgacagcaattcttgaccaataatcagctaatgtttcacccagtctcatagcaatccaaataaagttgtacctatcaaatattgtgatataacaaccaataatgataccaattgcagtcgctaacagggtaccccagaattggtctacaaaacttggttgttgataaacgtaaaaaattccatggaaacataggtttgtaactaagaccattatgataattcccggaacgaattctggaaccatttgattcacaacaatagaaggaattaattttgtaatggatatcaacaggaccagtgaagtggccagtagcgttataccggtggcaatggaataataatcgaatttggcccatagttcttcgcaggtctgcaagaagaccttttggtatttatgacccagcttaacaaatttttctggatcgcttgttgggggggtgttagatatatttttcgctaacggttccaatatttcgtcattgccatggtggatctgcatcgtgtccttatataattgtaattggcttatcgctgagttgacaaattgagaccattctctatcgtttcttgctatttcgtcaataggccatccaagattgttaaatggtatcggttggcccatcaataacgccaaactagacaccaaatcaatttgtctcactgaacggtaatcgtgtcccaaattatcaatgttgtaattcgaagtttctttaagtctccacatgtccggcttcttagaataaagaaataaagtgctttcgagctcgtcgatggagtcgccaccgtgattgcccgtatggtccattccatggtcacccaaaataaccaataaggtatcatcatcgatcgattttagtatccaatcgataaattgatctacttgaatttgtttttccctcatagtaaaatggtcggggccatatttgtggcccacatggtcaatacctagcatgtgtccaatcatgacgtcccattccttgtcctgctgtaaatgatcatggaagtaatccataacaccgttatcgacagtatctaagtcccacacattgagtgattctagtgggaaactatcgttggaaaggaacggatggaacagagccatccatgtatcatctccggcaaatttgacagtcttatttgccaaatggagctgtttaagaaagttatcctcttcgattactgttccatcgaagttagacccggcatcaatgaaagtcggtaaggaccctgttgtgagacccttgagtctttgtaaagtagtggttggtgggtcggcaatgaacttcaacaatagggaagatgcatccttatcgcttgcaaaagaatcatacaatgataatatattattatgatagttcaagttgtaattagagtgggattcgtttacaggaatagcgaaatcaaatctcaaagcgtcaataaccaaaatcaccgccttgttgaacctaggaggtaacttactcgtttcgttttgtgaggaaatattatcaagaacgtgtcttgacagtaagaatccccgagtgaaaaaagctattgatatgaattgtaaaatggcgatgaaaaccaatagaataatataaaatttatgattcttttgaaatttctttattcgcgatttgtatattattttttcatcattggaagatgaaagaatcgactttttaattgtcttttcatccatattacgggagctttttttttccacttaatgtattgatcttcctcccgttctttgacgattcggcgttgcccttaaaacatatgcttctattccttttttgatcttacccatttatttgtttttttttattttccggtggacaacaaaatgttaaaggaaaaaagaaagtaccttgctcgtcatcgcgcttgcataatgtgcgccattaccctgtaacaaaaacaaaagatagagtggcaacaacttgacacaactttgcaattgtaccatgaaccccaacaagaaaggcggttgagagtaaatgatgtggtttggttccttttttttcctacatttaaggttcatagagaagaaaattttctgaaatgtcttttcctcttttaatgaattgtaaaaaagccagtattggaataatattctattcaatatagtaagaaaagaggcaatgggcagaaatcttctcccgcataatcctttaaatgcaaaatacatgttaggcgtctaaatttttttcagtgaatccagatgcagaaacatttaaacaataaatatcttaaacccattttgaagcatcggcggctaaaaaaatgattttgcatggaaaaaaatgagagctgtgaacccaataaaaaagacagctttttaaaaatgtataacggtacattaagctcttgtttattcctcaaactgctcctaaaaaccatcctctcaaaaataataatgatagctgaagattatctgccacgaaatgccattgagccgcttacttgtaggttttcatgagtaataacgaagataatttacccgtctttataacccacgtaaaaataaacatataattatttcttattatttcaactaaccgttaaagtgttcaaatatggtagaaagctttccctatgtgcattatgattatcttttagccgccagagtttagtttaattttgttttgtttttgacgacttctggtgttacccgaaggtatatccccgggtgacccctaaaaatcgcaccccattttcccgaattttcttctacgttttcttttttcagaaatacttcgaatgagggatggaacaagaaggaagcgacatacaaaaactgagtcagtttagtcttaataggtgcaatatttacaaatacaggaaaggcaggaagcactggcaaaaagactgcatagctaaaaaaaaaaagaataaaaaaaaaacggagacctcaacagagcgaaaccaataattacaaacaaaatcttcatatgacttcgaaaccatccaccagtgacggcagggctcactcgatttcccatgtacctggcacgcacatgagaggaacatcggcatcacacagccccagaccgtttaggccatgtgcggattgtacgtgttctccaggcttactgtctaggcaaggtcgtagagcctctctatttttaagacagttagaaaattcaaggaggtcctccagcatgcttctcaacgagttgaagggcgctggcggaggtagcagtgctggaaatgggtctgtttactcatgtgactctctatgcgctgttaacagggaagttaacactactgatagattgttgaagttgcgtcaggagatgaagaaacacgatttgtgttgttatattgtgcccagttgtgacgaacatcagtccgaatatgtatcattgcgagatcaaaggcgcgccttcatttcagggttttccggatcggccggtgtagcctgtatcaccagagacttgttaaatttcaacgatgaccatccggatgggaaatccattttgagtactgatggaagatatttcaatcaagctagacaagaactagattataattggacacttttgaggcaaaacgaagacccaatcacttggcaagaatggtgtgtcagagaagctttggaaatggccaagggacttggcaataaagagggaatggtgttgaagataggtattgacccaaaacttatcactttcaacgactatgtttcttttagaaaaatgattgacactaaatatgacgcaaagggtaaagtggagctggttcccgtggaggaaaacttagttgacagtatttggcctgattttgaaactctacctgaaaggccttgtaacgatttactactgttaaaatacgagtttcatggtgaagaattcaaagacaagaaggaaaagttactgaaaaagctgaatgataaggcttcctctgcgacgaccggtaggaatactttcatagtagttgcgttggatgaaatttgttggttgttgaacttgcgtggatccgacattgactataatccagtttttttctcctacgtggctattaacgaagacgaaaccattcttttcaccaataaccccttcaatgatgacatatcggaatattttaagataaacggtattgaagtcagaccttacgaacagatatgggaacatttaacaaagataacttcgcaggcttcttctgcggagcatgaatttttgattcctgatagtgcatcgtggcagatggttcgttgtttgaacacctcaaccaacgctaacggtgcaatagctaaaaaaatgactgcacaaaactttgcgataattcactcacccatcgatgttttgaaatctatcaagaatgacatcgaaataaaaaacgcacacaaggcgcaggtcaaagacgcagtatgtttagtgcagtattttgcatggctggagcagcaattagtggggcgcgaggcactgatagatgaatatcgtgccgcagaaaaattgaccgagattaggaaaacccaaaggaacttcatgggcaattccttcgaaacaatatcctccacaggtagtaacgccgccatcatacattattcgccgcccgtagagaactcttcgatgattgatcctaccaagatatatctttgcgactccggttcgcaattcttggagggtacaactgatataacaagaacaattcacttaacaaagccaaccaaagaagaaatggataattacacactggtacttaaaggtggcttagccctagagaggttgatttttcccgaaaacactcccgggtttaatatcgacgccatcgctaggcagtttttatggtcccgcgggttagattacaaacatggcacaggccatggtatcggatcatttttaaacgttcacgaaggacccatgggtgtcggctttaggccacatctgatgaatttccccttaagagcgggtaacataataagtaacgaaccaggttattataaggatggtgagtatggtatcaggattgaaagcgacatgttaatcaagaaggccactgagaagggtaacttcttgaaattcgaaaacatgactgtggttccctattgcaggaagttgatcaatactaagttactaaacgaagaagaaaaaacacagattaacgagtaccacgcaagggtatggaggacaatagtgcattttctgcagcctcagagtatttcatacaagtggctgaaaagagaaacaagcccactatgacttcgaggcgagcggggcgcaatacaattaatgttagtatttattctaagtagtttctttctttttatttaatttgagtgataacaataacaacaataatgactaaaaggtgaaaattgaaaacattaccttcatttttttacggccggagaggggtaggtacacttaaccccgagcgcttttagtgccaaaaagagttaatgtgcgtagtcggattttaaacgaccatgcatgtacagccccctagtgatttatactgatgcctcatcaagaaattttttcatccagggtccctgctcggcgaacctttccgcaagagtcacaaaaatcaatcttataaccaggcaccagtagtactgccaagcttggactacatagccaacgtaaagacaaggagtctgatttagtatttcttttttgccagccagtattttctgcgcaggatagattattttaagagccgagaattccttatgcgggcccggtcacaacggattataggttccgccagaccccgttgctttggttccatggagcaggagcaggattttccgtggaaagagaagcaccgagcgaaaagcggatacggaaggcggatgcggaaacggatgcggacgcggaaggaaggaaggaagcaaacccttccgtctatgtcgctatgaagccgtctcacagtagagccattcgagatttccgtccgtcggtacacagaaatcttcgtatcgggagttttactttaaaaggaaacgatcgtaggaattccctaaagaaaaaggaagaaaaatttaacgttgaacattgtcattttcttttttttttttatgtgtgcagaatatactatcaagtaatgtgttctatatataaagggtacctcatttgatcttgatgtttctttctgctcgtatgccttgagtcaccagttttcaaaaataatcttggtctatagaagagaaaaatccaataatctgaaattggttcttcgcacccttgcaacgagatcatatactaaatatcgggaactctttatttctggatcttttatcagtcacttttttttttagtcaaagaagcaagagaaaactagacagagacaatgtcggatcattctcccatttctaataaggaaaatcatctgctgccatcagactcgtcaagaagctcatccagcgatatgcattcgacgggcaccacgggaaccacaggcgtcgaacctgtagatttcaccggtgaaggtgccaaatacacaactgctacggagggcaatggtggtgcagatttagcgattcaaagaacgacgactatgaattctgctgcagaatcagaggttaatatcacgagaagattaactaaaatccttactgggtctgttaacgagcctgaccgtgtagaggttgattataccaattgtgcgcccatgggtggtgacagaccttaccctccatcgttgccgagcagagacctgtacgaggttacttttgatggtcctaacgacccactacatccatttaactggcccatgaagaagaaagtgctgctatgtctggtcttatgtctggattctattgccattgctatgtgttcttccatttttgcctctgcagtgccgcaaatctgcgagatataccacgtcatcgaagttgtcgccattttgggtatcacgctttttgttcttgggtttgcggcctcaccggttatctatgctcctctttctgaattgtacggtagaaagggtgttctggttttatctgcgtttggatttgcccttttccaatttgctgtcgctactgctgagaacctgcaaactattttcatatgtagattctttggtggttttatcggggcagcacccatggccgtcgtccccgccgcgtttgccgacatgtttgatactaatgttagaggtaaagccattgcgctattttctctaggtgtttttgtaggccccattttatcgcctgtcatgggttcttatatcgcacaaagaactacctggagatggttagaatatgttgtcggttgtttcgcttccgcagttttcgttgccatcgtattgttctttgaagaaacacatcaccctaccattttggttaacaaggccaaacagatgagaaagcaaagtaataactggggtattcatgctgctcatgaagacgtggagctatccatcaaagacattgtccaaaaaactgtgacgaggcctatcattatgcttttcgtggaaccattgctactattcgtgactatttacaactcttttgtctacggtatcttgtatttgttactggaagcctacccacttgtctttgtggagggttatgggtttactgaaaacggtgagttgccatacatcgccttgattatcggtatgatggtgtgtgctgctttcatttggtatatggacaacgattatttgaaaagatgtagagccaaggggaaattagtgcccgaggccagattgtacgcaatggtcattgcaggtaccgttttccctattggtatcttatggttctgttggacgggctactatcctcacaagattcattggatggtccccacagtaggaggggccttcatcgggttcggtttaatgggtattttcttgccatgtttaaactatatcattgaatcgtatctattgttggcagcttctgccgtcgcagcaaacactttcatgaggtctgcatttggtgcatgcttcccattgtttgcaggatatatgttccgtggcatgggtatcggttgggctggtttgttattaggtctatttgccgctgcgatgattcccgtgcctttactattcttaaaatatggtgaatctatcagaaagaaatccaagtatgcttacgccgcttaagaaaaagaaaagcagaaatcatgctctttctatatttgcatttttttatttcattgttattactcaccctgccccacgctcaaagggctcgataacgacatagcattatagacactgtgcagcgtaaagctgacatataaagaaattacaaaaaaaaattaaaaaaaaaaaaaaaaacaatcaaaaaagacacacaactacagaacaaaggaaatctttttctatgcacaagcacaagagtacttagagagtagtgatatccccttttttttctactatttttttttttcccatttttttcctccaagactcctcttatgtggttgttatgtatagcccatagttactaaataaaacactaattaatgattaataatccctctctaataagaaatagataaaagctattgttcttctcatcgccggttctcggcgttgtccgtacccttggccgaaactcgggcgggggcttattagtcataccctcagatttcattggtcagataacagtcacccggtaaatgcccgtttaatgacttctttattttggattaaaattgacagggaatttcaacggaataaaggaaagagattgagatgcttttaattcataaaggaaagggaaagaggacaggaaagcaaggaagagtaatggaattttgcaaatatttgtaaatcctttagaattactaagaaactgttatttattgacattattttactcgtcttatttatttatttatacatttggccaccatttttgcactcgtacgaaagaccattttagatttttttgatttggtagtataacaaacgatcggaacaataacgtaacataatgataaacacaggaagaagcaggaattcagtactgctggcacacagattcctttcaactggaggattttggcgaggcggtacgaatggcacaatgtctcgcacaatcaacaacgtaaatcctttcaaattaaaattcataccgaagacagtgcccgcagctgcagactctgtctctccagatagtcaacgtccaggtaagaagcccttcaaattcatagtttccaatcagagcaagagtagcaaggcttctaaaagcccgaagtggtcgagctacgcattcccttcgcgtgagaccatcaaatctcatgaggaggccatcaagaagcagaataaagctatagacgagcaaatagctgctgcagtatccaagaatgactgctcttgcacagaacctcccaagaaaagaaagaggaaattgagaccaagaaaggcgctgatcaccctgagtccgaaggcaatcaagcatttaagggcactgctagctcagccggaacctaaattgattagagttagcgctagaaaccgtggatgttcaggactaacgtacgatctacaatatatcaccgagccggggaaattcgatgaggtagtagaacaagatggcgttaaaattgtcatcgattcaaaggcgttattcagcatcattggaagtgaaatggactggatcgacgacaagttggcctctaagtttgtcttcaagaatccaaactccaagggcacatgcggttgtggcgagagtttcatggtttaaaaaccttctgcaccatttttagaaaaaaagaatctacctattcacttatttattcatttacttatttatttacatatttatcatacatattaacattgaaccctccatcgtggtagtgtttgctgttcctaacttttctttcgttgttcttgtagatatatatttttccagaattttctagaagggttattaattacaatcttaaacgttccataaggggccgcgatttttttgttcaattttcaacagggggcccatctcaaagaactgcaaattatatcacagtaaaaggcaaaggggcgcaaacttatgcaacctgccagattattatataaggcattgtaatcttgcctcaattccttcataattcgttcctttgtcacttgttcctttttacccttgaatcgaatcagcaataacaaagaaaaaagaaatcaactacacgtaccataaaatatacagaatatatgaacgaccaaacgcaatttacagaaagggctctaacgattttgacgttggctcaaaaattggcttcggatcatcaacatccacaattacaacctatacatattctagctgccttcattgaaacgccagaagatggatcagtcccttacctacagaatctaattgagaagggccgttacgactatgatcttttcaagaaagtggttaatagaaatctagtaagaattcctcaacagcaacctgcacctgcggagataactccaagttatgctttggggaaagtccttcaagacgctgctaagattcaaaaacaacagaaggactcatttatagcgcaagaccatatattgtttgctctattcaatgattcgtctattcagcaaatatttaaggaagctcaagtagatattgaggccatcaagcaacaagctcttgaacttcgtggtaacactagaattgactctcgtggcgctgatacgaacacacctttggaatatttatcaaagtacgccattgatatgactgagcaggctcgtcaaggtaaacttgaccctgtcatcggccgtgaagaagaaataagaagcactattagagttttagcaagaagaattaagtccaacccatgtttaattggtgagccaggtatcggtaagaccgctattattgaaggtgttgctcaaagaatcattgacgatgacgttcccactatcttacaaggcgctaaattgttcagtctagatttggccgcattaaccgcaggtgctaaatacaaaggtgatttcgaagaaagattcaaaggtgttttgaaggaaatcgaagaatcaaagactctaattgtgttattcattgatgaaattcacatgttaatgggtaatggtaaggacgacgctgctaacatcttgaagccagctttgtccagaggccaattgaaggtcatcggtgccaccaccaataacgaatatagatctattgtggaaaaggatggtgcctttgaaagaagattccagaaaattgaagtcgctgaaccaagtgtgagacaaacagtggccatattgagaggtctgcaaccaaagtatgaaatacatcatggtgtaaggattctggatagcgccttagtcactgctgctcaattagccaagcgttacttgccatatagaagattgccagattctgctttggatttagttgatatttcttgtgctggtgtcgccgtcgcaagagattctaagccagaagaattggattccaaggaacgtcaattgcaattgattcaagtagagataaaagctctagagagagatgaagatgccgactccaccactaaagatagattaaagttagctaggcagaaggaagcttcattgcaagaagaattggaacctctaagacaacgttacaatgaagaaaagcatggccatgaagaattgacacaagctaaaaagaaattggatgaactggaaaacaaggcccttgatgctgaacgtagatatgatactgctaccgccgctgatttaaggtacttcgccatcccagatatcaaaaagcaaatcgaaaagcttgaagatcaggttgctgaggaagagagacgtgctggtgccaactccatgatccaaaatgtggtcgattcagacaccatttctgaaacagctgcaagattgactggtatccctgttaagaagttgtcagaatctgaaaatgaaaaattgattcatatggaacgtgacttatcatctgaagtcgtgggccaaatggatgccattaaagctgtttccaatgccgttagattgtctagatcaggtttagctaatccaaggcaaccagcatccttcttatttttaggtttgtccggttccggtaaaactgaattggctaaaaaagttgctggatttttgtttaatgatgaggacatgatgatcagggtcgattgttctgaattaagcgagaagtatgcggtctctaagttgttgggtaccacggcaggttatgtcgggtacgatgaaggtggctttttaactaaccaactgcaatacaaaccatactccgttttgttattcgatgaagtagaaaaggcacatcctgatgttttgactgtcatgctacaaatgttggatgacggtagaattacttctggtcaaggtaagacgatcgactgttccaattgtattgtcatcatgacttccaatctaggtgctgaatttatcaattctcaacaaggatcaaagatccaagaatctaccaagaatttggtcatgggtgctgttaggcaacatttcagaccagaatttttgaacagaatttctagtatagtcattttcaacaagctatctagaaaagctattcataagatcgtggatattcgtttgaaggaaattgaagagagattcgagcaaaatgataaacattacaagttgaatttaactcaagaggccaaggacttcttggccaaatatggttattccgatgatatgggtgcacgtccactgaacaggttaattcaaaacgaaattttgaacaaactggcactaaggatcttaaagaatgaaatcaaggataaggaaactgtcaatgtcgtcttgaagaagggtaaatctcgtgatgaaaatgttcctgaggaagctgaagaatgtctggaagttctaccaaatcacgaagctactataggggctgacacgttaggtgatgacgataatgaggacagtatggaaattgatgatgacctagattaatttaatatagtgtgatttttaaaaactttcgaacaagaatcagtaatataatatatataattaataaaactaatggaatttgtttaattgaacttgacacccgagcaaaagagctcacattttaacgtttagttcatcttgctgtgaataatctaaaagtaaacaatggacaaaaaagtccactggacgtcaaatctttttttattgtatttgggacatatggcgttgataactaaagtttaaaggaagtaataagtgaaggttaaatctggacctctttactttcatattagaagtataaaacacacgcggattggtccattattagaatacgggtactacaataatggttttgatagttactgtacatttgaatgtagcgactcatatgactcatatatatgactaccaaatcatgttaaaattagtatatctttaacttagacttcagtactatctgaactgcacgtttaaatttttaccatagcagttcatgtaatattaataatcacttgtgccaatataatgttacagcgaacatttttccatgcgcttggaaaattgaatgatagaaaattcgaacagcgatgatttccaacgatgtaatccattaagatgattgttagaatttctattgttgcagaggtcatatgatattaagaacacagcacaatatattaaaatttcttctcgaggatattgagaaatgggtgaattttgaggtaattgttgggattccattgttaataagggctataatattaggtatacagaatatactagatgttctcctcgaggatctacgaatcctcataatggaatcaatatttctatatactaatattacgattatccctcattccgttttatatgtttcattatcttattacattatcaatcctttcactacagcttcctctaacctcgatgacagcttctcataacctatgtcatcatctaacaccgtatatgataatatagtgatagttataactattagttgatagacgatagtggatttttattccaacagatataagaattacaaaaagagaactgttatttctacataataatattacgattagtactccttttatatgtttctttatccatttacattatcaatcctgattaaaattcccacgaacccccagtactagattgttcataatggatcaagttcacaagttaataagggcgtgtggtctagtggtatgattctcgctttgggcgacttcctgactaaacaggaagacaaagcatgcgagaggccctgggttcaattcccagctcgcccctttattttctttttttggacccaaagcactagcttaggctgtccatctttgttcttgattctaaagatcacagtagaataatggtttatttcttagagttctacaagttttagcgtactactgaacaatgaatgtcctgattttttaaaactcgcgcatatttggaggccatatcgtgccaccaactttactacagtcaaacacctgtgcccaattctaccacttattaaacaattacttagtaagatcagcaagcggttcatctgtcccccattcatatatggctttcaccctctttacctgtttgaaacagaaaaaaaattacaactaatggtatgcaattcataaagcataggccaaaagaccctgatacagatatatgctaaaacaataattataaaggattatgccgtaggaaggctgagaatcctcagtttgtgcactttgaaattcaaaatacaaaaaactgttgacaaattagtatcataactatctatcgcatatattcacgtcacataccgcctctgtggcaattgacaacacttatccctatcaaagacaatacaaagtatttgttaccgagtgagattatttagtacaatatgtgggtaataaaaactaatcggagatatttttttacgttttttgatgcaaacgcaataaattcttgatttttgaaattttgcaggacatcaagatacgtttcttttaagcagtttggattgcttctttcgttccgaaagtaaaacgtaatgaaaacccctatagtattgtgacgcgttttccaactctgcccttagcttgatttgacggcttagaacaaaggaacagtagcacgaacacttcaagtgcaaatgacagtttaattgtgggtaaaaaaggtagcctcaaagttgcattttttatggactgtaaagaacatacgattgttatacacttttgaacaaccaagatgtactacctcaattgtagtgaattaatgtcgaaatttgttagatgccccgaataaatagtaactttatttagggaaagcactcgaatttttgttattacggtcacgccatattttagcatgtacttagtaaaagacccatttcgccatcactatttttaccatttttttctatacgatttgggagcaaatacctgaactgcacactaatggacataatcacttggttgaaaaagtactatagtagactatacgtcgtacgctgcaatctattttaagcacagaaagcatccttcgtatgataatataacctttttggtaacagagttaccattgaagcgacattgcagtgaaacttgtttcaagatgtagttgggaggaattatgtgttgagttcgtccactttatgagctcgaagataacgagaaaattgctaagatgccggtgttggcttcttgcatatgaagaggcaccaataaaacgatgcattaattctttattacggaagttccgaagcagcgaagaatgaaaaagaatacaagcgctcataattgtcctcggtggacatcatatacagcataaaagtgtcttttttaagttctctcccctaaagatcacaaacttcacgtaattagtaacgtgtagactactaaccttgaaaaaacgaaccccttttctgcctagcaaccgtttaagatataccaaaaaaggcaactgtgatgacttctgaacgagggtccacgccaagtcacgccaagtttgttttcggatcttctgctagcagaaactcaacacacctacatgaaaggtaaagggtttcttagaaacattcactgtaccgtgcattgttcaaacctgcgcgattgcttggcaacggcgagaattacattacaagaaggtgtgctttcataaacgagaagtaataaacttgtgtcgttcagaaacaatagtatctcatattggctacaatggagaaacttacgatgtgtattcagtatattggttagaaaactgtagtttgttagttgaaaaattaatataaatagggtgtttttaatcagctgtaatagaagtacatcctcatccttcttcttcactaagctcacatcatcactaaagcaacaaccaaaaaacaacaaatacaatggtcaaattaacttcaattgctgctggtgtcgccgctattgccgctggtgtcgccgctgcaccagctaccaccactttatctccatctgacgaaagagttaacctggttgaattaggtgtctacgtctctgatatcagagctcatttggctgaatactatatgttccaagccgctcatccaactgaaacttacccagttgaaattgctgaagctgttttcaactacggtgatttcaccactatgttgaccggtatccccgctgaccaagtcactagagtcatcactggtgtcccatggtactctaccagattgagaccagccatctccagcgctctatctgcagacggtatctacactgctgtaccaaactaggatttgacgcccttacgaatagaactttacgagtattagaatgttatgaataaatgaaattggtttcgacggtatagatgaataaaggtattttgaaaattataaaaaaaagttttaataatatagatttggtaaaataaataggcgtatatacacattgtatactgttgatattatcaagtttttattattaaagagctctttttattttttatttataggggaaaatgaccgatattcctagtcttcaagtcactattatttttttttttattcataagtacaattgaataatattattgatttttttattattgttcttattctttttttatcatttctatataaaatattatatgatttagtttatcgtaaaaaaattaaaaaatacagaggaaagcaaaagtaaaacttttcggatattttacagggcgatcgctaagcttaatcaacttcttcgacagttggaccttcagcttctggagctggaggagcaccacctgggaaaccacctggagctgcgccttctggagcaccaccagcttggtacaatttagacatgattgggttggcaacctcttgcaattccttcaattggtcatcgaattcttccttggtagcagtggtgttgctgtctaaccaagcaatagtttcttcagccttcttagtgacagcgtccttgtcagcttgctctagcttgtcaccagcttcagaaatggtgttcttcaaagagtaagcaatggattccaattggttcttggaagcaattctttgagattccttttcatcttcttccttgaatttttcggcttcagcaaccatcttttcgatatcttccttggacaatctacccttgtcgttggtaatagtgatcttgttagacttaccagtacccttttcgacggcggaaacattcaaaataccgttagagtcgacatcgaaagtgacttcaatttgtgggacacctcttggagctggtggaataccactcaattcgaacttacccaacaagttgttgtccttagtcttggctctttcaccttcaaagacttgaatcaagacacctggttggttgtcagcataagtagagaaaacttcggatttcttagttggaatggtagagtttcttggaatcaacttggtcatgacaccaccagcagtttcaatacccaaggataatggagcgacatccaacaacaatagatcttgagtcttggaagattcgtcaccagtcaaaatagcagcttgaacagcagcaccgtaagcaacagcttcatctgggttgatagatctgtttggttccttaccgttgaagtagtcagtgaccaatttttggacctttggaattctggtagaaccaccgaccaagacaatttcatcgacttgagatttatccaatttagcatctctcaagaccttttcaactgggtccaaagtagatctgaacaagtcagcacacaattcttcgaatctggctctggtgatggaagtgtagaaatcgataccttcgaacaaagagtcaatttcaacggaagtttgagcggaggaagacaaagttctcttggctctttcacaagcagttcttaatcttctcaaagctctttggttggtagacaagtccttcttgttctttctcttgaattcttggatgaagtggttgaccaatctgttgtcaaaatcttcaccacccaaatgggtgtcaccagcggtggccttaacttcaaagataccgtcttcaatggacaacaaagagacatcgaaagtaccaccacccaagtcgaaaatcaagacgtgttcttccttacccttcttgtccaaaccgtaagcaatggcagcggcggtaggttcgttaataatacgcaagacattcaaaccagcaatggtaccagcatccttggtagcttgtctttgagaatcgttgaagtaagctgggacagtgacgacagcgtcattgaccttggcacccaagtaagattcggcagtttccttcatcttacccaagaccatggaggagatttgttctggggtaaagttcttggtttcacccttaaattcaacttgaatttgtggcttaccgtcaacatcgatcaacttgaatgggaagtgcttcatatcaccttggacttctgggtcattgaagtttctaccgatcaaacgcttagcgtcgaaaacagtgttagctgggttcatagcagcttggttcttagcagcgtcaccaatcaatctttcagtatcagtgaaaccaacgaaagatggagtggttctgttaccttggtcgttggcaataatgtcaacacgatcattagagaagtgagcaacacaggagtaggtagtacctaaatcaataccgacagctttagacattgtataaatatttctgtataaaatctgcttgatctgttggaattaatcaattgaagaatagaagtaacttaaataagagagtattatattttcaacattttttggagaaaacccagcccaattgcggcttatatataacaattcgtccacaccttcccatagtgcttaagaatgaaatttcgtcaaaacctcgaagctttttttttcgaaatcttcgatggaatgttctagaaaaaaacttcgagaaagtgaatcggaagaacttctcggaaaaaaaagcttcggaaatactacgaataagggcccaagagagagtaagaatgcagtgccatgcagtcaattcaccactgtgagaccgtaaaagggttggttgagtaactcaattcaaggaataaagatataaaattgataaaaaatatataacaaattgtaacaaaaagcaaaagagaggagtggaatgttatacaaagtaattagaaggtattgaacttgtaaaaagtaataataaaactcaattctgcttcttggtcacttgtggggcaccgcttaagcggtactcagacaagcggatcaagctcattttaattgcattataagctcttttgacgaatggtgggatagatgggtggcttatgatcccgtccattctaactctccattgagcaaaggcggctttcatgtacttggagttttcgtatcttaacttaataaagatggcgtacacaacaagtatgatccaagacctttggaagcacagaatggctctgaaaaggaccaaaatgaaaataagcagctcagcagtaccgacccagtgcatgcacaagtcattgtactgaacaacaaacttgtcgatgaagctgaggatcttacttgaatctttactggaaaggtggaagacttttggtaagagaactttttcaacgtagattaaaacatggaatacagcaaacgcgaaaaatgggattaagctgaatgaaaatcttggagtgaacaaccagaagttggccaaaaccaaataaagcacgtcttcactctttaggagtccagcaacgcgtgattttatggaagccttagtggcagcggcatcttgagtctgcaatggttcattgcgggtgaaaaattgctggtaaatgatgataccgaaagattcgatgacaccgagatatgccgatctgtaataaaattctgacatcttgagcaggtaaagaatggagctgatcaatacgacggaatgaccggtaaaccatgcaaactgcaagctcttggctactgccatgaacctttgcacgagcgacttatctctggcagggaggtttggggggccttggttattagcgggtcttgatgacattatactgactattcttggctagtgtttcttgctccttatgaatagagaaaaatgactttttttagatgtagtaagtatgtcatttcagggatggtctgcttgctctttaaatattttttcacccttttaaaatggggccctttcgccgtaccaaagaaggagaaatatacattacgtatgtaggttgctacattttacacaaaactatcaatgccttctaggcttcttcttgaccagttgagagagatcattgaagtcaccaaggggcttttcgagggcggggaagccgatggaggtcgtgggctgcgaaagaggcctcttggagccgtgctgctgattttcttgcacctcatcaatatcgtcttgaatctgtgcgagccttgcctgctgtaactcgctgtccttgggtcttgtagtcatgtgtttttcaagcagagccttggcatgcttgaatctttttagtttgtccttagccggcacctgatcaacccaccttaaagcatcacacaccaaaaattctgcttgtatcaccttctcagttacttgttctgcgggtttcaaggtcttgtaatagccaagcgccttcaagtaatgatgaatggctctactgaacatctccgcctccctttcgatgtcacccatcaggatatacacatcaccgatgcgcaatctgctgttctcggttagagattggccatctgctgtagggcggcccaacagcatcaaggcctgcgccagtaggtccaaagcattctcatacagatcattttcaaagtaaatgtggaaaccagacttgcgaagttgcgatacgtcttcaatttcatcgtcatgttcattcgctggactgaagttagccaattcgtgcaaagctaagcgttcttcctctttctccacgttttcttcctcttcttcgctaccttcgccactgtcctcactatcaccactgtcgacatcaccagtcaagtcttcctcttcttggtcgaattggaacatcctagaattaggaatttctgtttgaccgttctcgttcccctcttctccattgctcacatcagactcaggctcagactcagactcagacccagatccatcgtcacctgccagaagagcgtccccaaacagattaccagaattctgtacttccatgttgtatacagcttgtgcgaatatagtaaacagttcaggatcaggcaacaaaccatcttttgggagagagtccaaagtttgttggcagcgtttagcagcttctaagaactttttctgtgcgagtaaatcttttgcaatttgaacctgtctttccatatcaatttgaactttatgtctgctagttccgtttgccaacacgtcttctgcccttagtttcatattctgttacttctagaaggagacctcatcgccgatgttacctcaaaattgagtagaatgaaataatacaaaattggaaaaaacgcgaaacttcagtgcagtaacatatcgttccgacattctctgagaagtggtaagattccactgccggggagctacgagtgctcttgcaagtttttagacactgctatatccttcgactacgtaaccccatttttttatttttctatataaaaacatgcactgtatacatataatcacgtaagttcaagtcgtgcttaaaacgggcacagaaaactaactatgagttgccgtaccatacataaactaggagaaggtagcgcagttctttttttttaccaaaggtttgcacaaaaaagatggtctaacgtaagtaagttatcaataaaactgttaaaagtagtataagaatcttgagataggcttattattatgactttttatggcggaaaaggaagaagaaatactgcgccgggtgatgcgtgacgcgtttttggaaacgatgagaataaactttgaagtattttgagaataatattctattatcgagttctttcagcagaaagcaacacatagctacgtatagttcggtaagataaatttggtcagaagcgtgtgaaagacgctgagaaaccacgtgagacgaagattcaaatcaaggcgtgaggaataacgcaatacgagccaccgaaacagaataaacaaaagaaaagaaagagtaaacatgggtacgtcaagcgaggtttctctcgcacatcatagagatatcttccattactacgtctcactgaagacttttttcgaggtgactggcgaaaatcgtgacaggtcaaattcgacacgagctcaaaaggccagagccaagctgttgaagctatcttcttcgcaattttacgagctgagtacagacgtgtccgatgagctgcagaggagaatcggtgaagatgctaaccaaccagattaccttttgccgaaggcaaatttccacatgaaaaggaaccaggctagacagaaactggccaatctatcacaaactcgatttaatgatttgttggacgatatcctttttgagatcaagagaagagggttcgacaaggatttggatgctccacggcccccattaccgcagccgatgaaacaagaggtcagcaaagacagcgatgatactgcaagaacatccacaaattcttcctctgtgactcaagtagctccaaacgtctccgtacaaccttctttggtcattcctaagatggcatctatcgattggtcttctgaggaagaagaagaggagcaagtaaaggagaagccaaatgaaccggagggaaaacaaacaagcatggatgaaaagaaagaggctaaacctgctctaaaccccatagttacagattctgatctgcctgactcccaagtgctcgctcgtgatatcacatcaatggcaaggactccaacaacgacgcataaaaattactgggacgttaatgattctccaattatcaaggtagataaagatatcgataacgaaaagggtcccgaacagttgaagagccctgaagtacaacgggctgagaacaataaccctaactcagagatggaagacaaggttaaagaactgactgatttaaacagcgacttacatttgcaaattgaagatttgaatgctaagttagcatctttaaccagcgagaaggaaaaggagaagaaggaagagaaggaggaaaaagaaaaggaaaagaacttaaagattaactacaccattgatgaaagttttcagaaagaattgctgtcattaaactctcaaatcggtgaattatcaattgagaatgaaaatttgaagcagaaaatttcagaattcgaactgcatcaaaaaaagaatgacaaccataatgatttgaaaatcactgacggttttattagcaagtactcttctgccgatgggctcattccagctcaatacatcttaaacgctaacaacttgataattcaatttactactaggctttccgcagtacccataggcgactccacggcaatttcccatcaaattggcgaagagttatttcaaatattatcccagttatcgaacctaatctcccagctattactatcggccgacctattacagtacaaagatcaggtcattttactgaaggcatcattatcgcatgcgatcacatcgataagatatttctctgtttacggtcccgtattaattccgaaaataactgtgcaagctgctgtttcagaggtttgttttgccatgtgtaatctaattgattcagcgaaaataaaatccgattcaaatggtgagagcaccacctctaatgaaggtaaccgacaggtattagaatattcttcaccaactgctaccaccccaatgacgccaactttcccctcgacttctggaataaatatgaagaaggggtttataaacccaagaaaaccagcatctttcttgaatgatgtggaggaagaagaatctccagtcaagccattgaaaattacacaaaaggcaattaacagtccgatcataagaccgtcatcgtctaatggagttccaacaacctcaagaaaaccttcaggaacggggctatttagtttaatgattgattcatcaattgctaagaatagctcccataaagaggataatgataaatatgtctcgcccataaaggcagtaacatcggcctccaattctgcaagtagcaatatttccgaaattcctaaactaacactacctccacaagccaaaatcggtactgttattccaccgtcagagaatcaagttcccaatattaaaatcgagaatacagaagaggataataaaaggagtgacataacaaatgaaatctctgttaaaccaacttctagcattgctgataaactgaaacaatttgagcaaagttccgaaaagaaatcatcaccaaaggaaaatcctatagcaaaagaagaaatggattcaaaaccaaaactatccaataaatttatcacttcaatgaatgatgtgtccacagatgattcaagctctgatggtaacgaaaatgacgatgcagacgatgatgatgattttacctatatggcattgaaacaaacaatgaagagagaaggttcaaaaattgaaaaaaataatgacagcaaactacctgcaaatatagtggaacttgatttacatgagtcaccggagtccgtgaagattgaatctcctgaatcgataaaggaaatcacgtcatctgaaatgtcttcagaaatgccaagtagttcgctgcctaagagattagtagaggatgttgagccttcagaaatgccagagaagggcgcatctgtagaatcagtcaggaagaaaaattttcaagaaccacttggtaatgtcgaatctccggatatgacgcagaaggtcaagtctttgggtatgacaggaaaggctgtaggcccagaatcagatagtagggtcgaatctccgggcatgacaggacagattaaatctttgaatatggcaggaaaagttgtaggcccagaagcagatagtagggtcgaatctccgggcatgaaagagcagattaagtctttgggtatgacaggaaaaattacagctcaagaatcaatcaagtccccggaagcggctaggaagttggcgtcatcaggagaagttgacaaaattgaatctccaagaatggtaagggaaagcgagtccttggaggcagtaggcaatactatcccctcaaacatgacagtgaaaatggaatccccaaatttaaagggaaatactgtgtctgaacctcaagaaataaggagagacattgcctcctcagagccgatagagaatgttgaccccccaaaagtactaaaaaagattgtctttccaaaggctgttaatagaactggatcaccaaaatcagtcgaaaagactccatcttcagctacactgaaaaagagcgggctcccagaaccgaatagccaaattgtttctcctgaattggcaaaaaattcacctctagcaccgataaagaaaaatgtcgagttacgagaaactaataaaccacatactgagactatcacttctgtggaaccaacaaacaaggatgccaatacttcttggagagacgccgacttaaaccgtacgatcaaacgagaggaggaggacgaagattttgatagagtgaaccacaatatccagatcactggtgcatatacgaaaactggaaaaattgattatcataaaatacctgttgatcgtaaagcaaaaagcgaagcagaagtgcatacttccgaggaagatattgatgaatcaaataatgttaatggaaaaagagctgatgcccaaatacacatcactgaaagaaagcatgctttcgtaaatccaactgaaaattcacaggtaaaaaagacgagccactcaccatttttaaacagtaaaccggttcaatacgagaactcagagtcgaacggcggcattaacaaccacataaagataaaaaatactggagaaactacggcacatgacgagaaacattatagtgatgatgatgattctagctatcaatttgttcccatgaaacatgaagaacaagaacaagaacaaaacagaagtgaggaagaggaaagtgaagatgacgatgaagaggaagaagacagtgattttgatgtggatacatttgacattgaaaatccggataatacactatcagagttactattgtatttagaacatcaaacaatggacgtcatatccacgattcaatcgcttttgacatcgatcaagaaaccacaggtgacgaagggtaatttgaggggagaatcgaatgcaatcaaccaagtcataggtcaaatggtggacgctactagcatatcaatggagcaaagcagaaatgccaatttgaagaaacacggtgattgggtggtgcaaagtctaagagactgttcgcgtagaatgacaattttgtgccaattaactggcgatggaatactagcgaaggaaaagagcgatcaagattatgctgacaaaaacttcaaacagcggttggcagggattgcgtttgatgttgccaaatgtacaaaggagctggtaaaaactgtagaagaggcaagtttgaaggacgaaataaattatttgaattcgaagttgaagtaaagttagtagtatctagaggagaaagaaaaggaagacaaagacaatcaatagaatgtattatgtatgacatataataataataattataataataataataatagtagtagcagtaataataatattattatagtatattaaaacaacaaaaaattagtaaaaatactataaatgtttgaatatgaagatatatatgtaggaagaatttttattgaatatagaaatttaaagaaatattattaaaaaccggaaaatgaaaaagaagagttaaaaaaaaaaaaaacggaactagtaaaagatgtgaaaaaaagaagagaaaagtagaacgagaacacccactatccttgggtattattataagttgcaataccatcatccagtatgcccagattaaaccattcatggtccagagcgtcctttgcggtaatcctttttgttgggtcgaactcaaacattttcctgagtagatcgatgaaccagtaccaaaacaagaaagtttccttatcgagttcatcagtagttgaggaagaagaggaatgtgtttgtcttttccatgccaatttcgaatttatcaaagaccagtttttctccggcggtagattccaattgatgcttaagctatcgccgtaatcctgtttcaagacctttgagatgtaaatatctaagcgatcacatgactgcaagacccttttcattgacttttcggtggttatggtatctccgcgtttatttttttcaggccattgtaagcttaaagtttttctgtcgaaatgctttatcaccgttgaatttaggtctgatggagagttgcccaatttatgtttagatttgtaaaacatcttatcaataatgtctgtggggaaaggggttccattgattcgttgcatcatagccatatgttctagattttcatgaatggggtaaagagattcgccaataaccagttctactaggacacacgcgatggaccaaatgtcgcaggggaacgaccagcccaagccaaggacaatttccggggctctatagtgacgagtggatattacaggaggatgatattcgtaatggaaaattgcgctaccgaaatcaatgattttgatttctggatttttcaagattttgcgcttccccttactggcttcacggcgtctcttgcttagcgactgtacggttttcaaaggcaatttttgagcaatatgggtttcgtcacaaatcaggatattttctggtttcaaatccgtgtgtattatgcccaaatcgtgcaagaagcagacagatctgattagctgtctggcaatggcctgaatatgagagccggggaacctggcaatgccgttggagcacataaaatcgtaaatggacctgccgtatagatctgtcaccaaacaaatgtgatttttgtaatcgaagcactcccttagcaagaggcactggaactgaccttgagggtcattattcaggatagtctgtagaattcttagttctgttttggcggcttctctatatctatctacagcccttatcacttttacagccacgtaattaggttcatacttgttatcgatgcatttaagtactttaccaaacgtgccttggcccaataggtccttcacaacaaagcggccgccactgccaaatatgtcgttttcctggtaaacgtagtgaccgtctttgtccgttttgaaatttgatttattggatgatgcgctttctgaagagccgtttgatgtaaatttccgtagtgaagaaccaatttgtttcttgaggttggattgaggcagggaagctatttgtgctggtgggttggaaaagggagaagtgctgtgagcaatcgtgagattcactgccttgttgccctccagagtctttgcacacgaccccgttagatgcaacagctcattttcagtttgcgttactcttggcacgatagcgttggtttgatcaggaacattaaaatagttcgattggtagctcagcttcgatagaggcaactgaggcagtgagatggttctttgcttcttgaatttctttggtgtcgtgatatacgtactattgcttgtagctgcggtaccgcaccctggattatttgaagtaacaatattattgttgttattgatactgctgctactaggcagaatcaaaggtgacgaaaactgaattggctgctctttgataaaaatgatgtcatcgtcagcatcctcgtccactcgactactgttatgattattactgttattgattgtggtgttaatgatacgcggctcctcgtctagttctatggcattttcattgtccaagaacaactggtgttggtgttgccgaggacggagcggattgtctgcttgattcaggtctagactgttcctcagattgtctgttagaaaagaattttgccgagcaaacatctcgtccagcagcttgtttgtgcgcgtttcttcgaaattatccaaaaaggtcttgttagagcttgtattgttagcagggcccgtagtagtggaattattcatatttgctcttgaacgttttctagtgccaatttgaatattctgtgacataactaaggtacgcggaagataaagcaataatgaagaagagcagtatgcgtgtagattagtctttgttgtgctaaatcttcgacttggtaaatactatgtttctttcactctttttctgtctcccactttgtttcctttttctttttcttttttttttttgggtttgcttgctatctggcgcagtatttcgtgaatataatatctatttagttagcgtaagcacgaggagttactgcactgtttcctttcacttggtggtgaggtaacaatactttgtaaatccggtagatctgggaagtaaatactaaactttattctaatataggaacttcataatataaaatccaacgcacgatgctagagataaaaaaagagggtgggagatgtggagccaggattcaaatcgaaaatcgtaatcggaaactaaaccagcattgcaaccgggccataagccatatcgttaagcacgccaaagctttttcccttcgctgtgtgtttcctcgcaactttaactccggccactcactaagccaaggcgtgaggagagagactaaagctttgtggaaaaccgcccaatcacgctgacccctttggcccgtttgccgccccctagaaaaaaaagaaacggacgggcctgggcccgcacagcctcgagcagggtcacttcgcgccatatcggcggctatttcaaaaaaagaagttctttaccagttgttgtagaaagtatgatattaccaacagcgtctagcttttattcgatattccgatgtgggcggctatttattatcggtggcgtcttttatggttttaccgttgttgcctggagcatcctcaggaagacctaaatgtgaccattcatcgtagtccatcaattggtggtccatcctgcaccgcaggtagtcctttgccagtagtctacaattcattgcattttcgttctgcacaagctgcatacatttgagatactcttgcatgtacttggtgcattcgccgtcgtggtctagcgggaacgaacctctctcgggtggagtaggtctcaatgcgctcagcgagcttcctgggttccctgacattggattcttgtgttatgtttcgtaaaagatactttgtgtgtagtgggtgcgtttgcttgttttcttgaagtatagaagaaggaaagaacggaagaaaaaatttttttccctcttgttcgctttatttggattttctcgtttctcaactccgcgaatttgagcccttttcttagaccccggagagaagatgcagagatgtagtaataaaagctttttatccaaaaagcttttaagctgttgttttaaaaaaggttaaatgggcgctttagagatcgggtagtgggcaaagcctgcgataagaaaagagggagcgtgctacttgaccgggagcagcaaaatgggcggcccgagccttagatcatactcatcgccgataagagtcagcttggtaatagaaccgctggtgcgtaaatgaggcatagaacttattatcgtcttaaaaaactgcccaaaaaaatattttccaggtttcttgaagagtaatcttgttatgtaatttttttttgcctgtggattgtataagggaccagaggcggtcaaaaacgcaaaaagcggcatggtaggcgaaaatactaggacgattactactcaactgacgcgtcaacttaatattgtcctggtacataaccgaaccatcccagatgcgctgtaagtactgtttaaatgtattttaatatgtgcatagagcgtgtaaattatggcgagctatggtttccgaattgtcggactgctcatagcccttgctttcggaatattagaagtggtctggcggtaaagaaagtgtgacatatgtcagacgttgagacttatatgtgtaaagctaaatataataattcagttaaaataaaagtgggtgacaggaaaaaattagaaatgttgaaaatttttttaccttcactcgctacataaaaacgttggaggagactccttcatggtcttaatctctttggatctcttgggaacaatgaagctcttctgatatttttcaaatccaaatagaacataacaactctttccaaaccgataccaccaccggcgtgtggaggacacccatagctgaagccgtcacagtagtcctttagacctgggtcctcaggagacaaaccatgggctttcatcctttcttgtaatagagcatggtcgtggatacgttgtgcaccggacaagatttcttcacccctcatgaagaaatcatacgagttagaatacttagggttggctgggtcgggcattgtgtagaagggacggatctccaaggggaacttgtctaggatgtaaaagtcggtgtcgtatttgtcgcgaaccaacttacccaagaacttttcattttcggtactcaagtcttcaaaatcaccaatttccttaccggcagctcttagcatttcaataccttctttgtatgttagacgaaccatcttaccatctttaggtaacttgaattcttcaacagggtattgcttacgtaccaactcaatttcatgagcaaatctcttgggcaattcactgaaaataaacacaaacaactcactcaacgtgtccaaaacttcgtggtaatgttcttcgaaagccatttccatgtccaaaccagtaaactcggtcatgtgacggtgggtgttggagttttcagccctgaacacaggcccgatttcgtaaactctttcaaagtcggccacaatcaattgttgcttgttaaattgtggagattgagctaggtaggccttccctttgaagtatgtcacctcaaacacactggaaccaccttcacttggtgcacccaacagttttggtgtgtgtacttcggtaaatttctttgtggccaaatattctctgaacaactcacaaacaccagcttgaatcctgaaaatagcttggttggtgacggttctcaagtcaatgacacggtagtctaatctggtgtccaagttgaccacgggcaaacctgcagcttcagcttcagcttcggaacgggaggcatcttccaaaaggattggcaatgcttctggagtctcggaaatggtataaatcttggtaatgtgaatttccaggttttgcacagtagcagacttgattggctcatctaccttcttgacaatacctctgacaaggacaatggactccaaattcaatgaaccagcccatttgaccatgtttttgctgatggtaccttccttgttggcctttactagaccttggatcaaggaagcttgttgccttaaagttaaaaaggccaatgttgcaccttgttgtctggtgttgtggactcttgccctgaagaggacttctttgtcgctatccttagcctcatccaagtcaacaaacttgacacgcttctgaccagttctgtcagagtcacgagactggatcaatggcaacttaccgtagttgtcctttgcggtgtcttcggcagcggctttcttttcacgggcttctctttcagcttccaactggagagctctttcctccttctttctctgtttctcttgctctttctgcaatttcttcaaggccttcttggacaatggcttaccatcttccccaagaataacttgagcaggttctgcggattcttcaacagctttgacaatattttcgtcttgagacatcacgtaaaatgtttctttttttcttttacaattaaccttaagaggccgttccagccaatgatcgaaaacttaaacaaatcggttgtcttgcttcatccttatatgacattaaataatttttcatttcttcttttttcacgaaaatgcgtcataaggtactcgtcactgatgatttcatagacaataaagcaacagcacaacgtaaaagagttcttatggatgagtcccaatcctattgttttctgtagcctaatggtacaaaatgtgacggtaatagaatatatactttcataatatcataggaacatcttcagcttggcctgtctctttgagaaacaaaaactgcatgtgcacaattactgcagatgaacttcaaggaaacatatgtcctgcttggaggaccagaagcaaaccattctagctgtatttgcaacgcttttgtaccaaatgtacgttattatgttatgtcgtcagtgtagatatattagatttacatgcggctgtaccgcatcattggaaaataatgtctgcaggctcgcaaaatttaagggttcccttctacaatagtagtcaaaattgcttttttgcatataacaaagtgaaaaaaaaaaaaaatatgagagacatatctaaaagacatatataatctgccaccagaatgagttgcactgcgtcatatgccggcatgacaactccggtgaaggataaggaaggccacgggattccatgcttacaacctatcgatgtagtggaatgtacctatcaatattttacaaaatcacggaataaactgtctttaagggtaggcgatttgatttacgtactcactaaaggttctaatggctggtgggatggtgttcttatcagacacagcgctaataataataataattcgttgatactagacagaggttggttccccccttctttttacacggtccattctaaacgaactacacggggtgcctgacatcggtaatgaattggaaatatttcaagcgggtcttaatcttaaactggaattatcaagcaacccagtgatcttatcattggaagactttttagactgctgtcgcgatattgaattcaaggaacaactggcttggtcacctactcccgtccacgaaaggaaaggctgctgtgagctgctgtactataaccaggatttagatgtttattgtcgcacgttaccatatttaccacaaaatcaagttgaaaccgtgaacgactattcgtcttttcctgcaatatcgaagatagctggtaaaaagatgcctataacgtcaagccccgatctgttctatctcaatgattgtgatgtcgtctattggtatgacctcactcgcttagtgtgtcattatgttaatttaacagagcgcgacctattggcaaatgaacgggaaaagtttctaacttccttggatttattaacagctcaaataacctatgtttatatgcttttcaggaatctccgtttagttgaagatagtttcaaaaaaaccctcaaaaaactaatttacaccttgtctaggttttcaataaatgcaaatatttggtttcattccacattgtttgaagaaagagaagccatagcctcccagaaggatccagaaagaagatcccctcttctacagtcaatcctaggaaccttccaaaaatttcattttctactgcgtttactacatttcctctcaaatcctaacgaacttacaatactgcctcaattgactcctcgatttttcaaggattctttcaatacaatttcatggaataacccgtttttgcgtaagcgtctcaaccagcatatgtcccatgacctaccgagacagatgattaaagccgttgctggtgcttcaggaattgttgcggaaaatattgatgaaattccagcttccaaacagggcacttcatgctcgtcagaaacgtctcaccattcaccatcagccccgtttcaaagaaggagaagaggtaccattttctctaatgtgtcaggaagttccgatgagtctgacaccatatggtccaaaaggaaaaaaccatacccgctaaatgaagaaactctaagccttgtaagggccaggaagaagcagcttgatggtaaactaaaacaaatgatcaaaagtgctaatgaatatctcagtaacacggctaatttttcaaaaatgttgaattttgaaatgaatttcaaaacctacgaagaagtaagcggaacaattcctataattgatattctggaaaacctagatttaactatttttctaaacttgagagagttgggagatgagaatagagtttttgacgaagatgtcgctattgatgatgaagatgaagagtttttgaaacattctttatcatccctatcgtatatcttatccgactattttaatatgaagcaatattttcatgatgtagtagtgaaatttataattgtcgcccagcatttgacattagaggatcctttcgttttctcgccaatgcaaaacgacttgcctaccggttattatgaaccaatgaaaccttcatccttgaatttagataatgccaaggataagaagaatgggagccaaaatactgatatccaagaggaggaagatgaatatgagccagacccggatagtcttattctcttccacaacctcatcaatcaagattctgatttcaatgatttaaagttttttaatctcgcccacgtttttaaaaaatcctgtgatgactattttgatgtgcttaaactagccattgagttcgtgaatcaattaattctagaaagagagaatttgttaaattatgctgctagaatgatgaaaaacaatatcacggaattgctattgcgcggggaagaaggctatgggtcctatgacggcggtgaaactgccgaaaaaagtgacacgaatgctgtttatgcagattcagatactaaagacaatgacgaatggcgtgacagccaagtcaaattaccgaggtatttgcagcgcgagtatgacagtgaactgatttggggctctaacaataggattaaaggtggttctaaacacgcactgatctcttacttgacagataatgaaaagaaggatctatttttcgatattacttttttaatcactttcagaagcatctttactacaacggagtttttaagctacttgatttcgcaatataatttggatccaccagaggatttgtgctttgaagaatacaatgaatgggtgacgaaaaagcttataccggttaaatgtagggtggttgagattatgacaacctttttcaagcaatattggttcctgggctatgatgagcccgatcttgcgaccctaaatctggattattttgcgcaagtagcaatcaaggaaaatataacaggatctgtggaattactaaaggaggtcaatcagaagtttaaacatggtaatatacaagaagcgactgcaccaatgaaaacgttagatcaacagatctgccaggaccattactcgggcactttatactctaccacggaatccattttggccgtcgatccagttttatttgccactcaattaacgatactagagcatgaaatttattgtgagataaccatttttgattgtttacaaaaaatttggaagaacaagtatacaaaatcgtatggggcttcaccgggtttgaacgagtttatcagttttgccaataaactgacaaatttcatatcctactctgttgtaaaggaggctgataaaagtaagcgcgccaagctactctctcattttatttttatcgcagaatattgtaggaaattcaataacttttcttccatgactgcaatcatttcagcattatattcttcaccaatttatcgtttagagaaaacctggcaggcagttattcctcaaacgagagatctattgcagtcactgaacaagttgatggatcccaagaaaaatttcataaattacagaaacgagctgaaatctttacatagcgctccctgcgtaccgtttttcggcgtttatttatctgatctaacctttactgattccggaaatccggattatcttgtcttggaacatggtttaaagggtgtccatgatgagaagaaatatataaacttcaacaaaaggagcagacttgttgatatcttacaagagatcatatatttcaagaaaacacattatgatttcactaaagatcggacggtaattgaatgtatatcaaattcattggaaaacatcccccatattgagaaacaataccaattatcattaattattgaaccaaaaccaagaaagaaagtcgttccgaattccaattcgaataataaatcacaagaaaaatccagggatgaccaaaccgatgaaggaaaaacatccactaagaaagacagatttccaaaatttcaattacataagacaaagaaaaaagctcccaaggtttctaagtaacggcgccgtatgttcgatttccttctctcggtggattaattattttgtttgttttctcctgttatattatttattgatcactatagtaaactatgtccgtcatcaagcccgacggctgctatcccacaatgttgatcgtattgtttgcctagtttattatatatttgcttatttatagcataccataatatttaaatgccctcaaatttttggccgtagcgacatcgcgataattccaattccctttaaaaaattgcgcctgagtataagttaattcagccagttctccaaattaaaatcgcatactcctgaacctatcaacagattgtcctcgcatacttttctataccaaggtctcttctgaacatatattagcagtggttaattttaaagagatcataaagaaaattttgtctaaaaaagattaatataaagacaatgtcttcactagaagtggtagatgggtgcccctatggataccgaccatatccagatagtggcacaaatgcattaaatccatgttttatatcagtaatatccgcctggcaagccgtctttttcctattgattggtagctatcaattgtggaaactttataagaacaataaagtaccacccagatttaagaactttcctacattaccaagtaaaatcaacagtcgacatctaacgcatttgaccaatgtttgctttcagtccacgcttataatttgtgaactggccttggtatcccaatctagcgatagggtttatccatttatactaaagaaggctctgtacttgaatctccttttcaatttgggtatttctctccctactcaatacttagcttattttaaaagtacattttcaatgggcaaccagcttttctattacatgtttcaaattcttctacagctcttcttgatattgcagaggtactatcatggttctagtaacgaaaggcttactgttattagcggacaaactgctatgattttagaagtgctccttcttttcaattctgtggcaatttttatttatgatctatgcatttttgagccaattaacgaattatctgaatactacaagaaaaatgggtggtatccccccgttcatgtactatcctatattacatttatctggatgaacaaactgattgtggaaacttaccgtaacaagaaaatcaaagatcctaaccagttaccattgccgccagtagatctgaatattaagtcgataagtaaggaatttaaggctaactgggaattggaaaaatggttgaatagaaattctctttggagggccatttggaagtcatttggtaggactatttctgtggctatgctgtatgaaacgacatctgatttactttctgtagtacagccccagtttctacggatattcatagatggtttgaacccggaaacatcttctaaatatcctcctttaaatggtgtatttattgctctaacccttttcgtaatcagcgtggtttctgtgttcctcaccaatcaattttatattggaatttttgaggctggtttggggataagaggctctttagcttctttagtgtatcagaagtccttaagattgacgctagcagagcgtaacgaaaaatctactggtgacatcttaaatttgatgtctgtggatgtgttaaggatccagcggtttttcgaaaatgcccaaaccattattggcgctcctattcagattattgttgtattaacttccctgtactggttgctaggaaaggctgttattggagggttggttactatggctattatgatgcctatcaatgccttcttatctagaaaggtaaaaaagctatcaaaaactcaaatgaagtataaggacatgagaatcaagactattacagagcttttgaatgctataaaatctattaaattatacgcctgggaggaacctatgatggcaagattgaatcatgttcgtaatgatatggagttgaaaaattttcggaaaattggtatagtgagcaatctgatatattttgcgtggaattgtgtacctttaatggtgacatgttccacatttggcttattttctttatttagtgattctccgttatctcctgccattgtcttcccttcattatctttatttaatattttgaacagtgccatctattccgttccatccatgataaataccattatagagacaagcgtttctatggaaagattaaagtcattcctacttagtgacgaaattgatgattcgttcatcgaacgtattgatccttcagcggatgaaagagcgttacctgctatagagatgaataatattacatttttatggaaatcaaaagaagtattaacatctagccaatctggagataatttgaggacagatgaagagtctattatcggatcttctcaaattgcgttgaagaatatcgatcattttgaagcaaaaaggggtgatttagtttgtgttgttggtcgggtaggagctggtaaatcaacatttttgaaggcaattcttggtcaacttccttgcatgagtggttctagggactcgataccacctaaactgatcattagatcatcgtctgtagcctactgttcacaagaatcctggataatgaacgcatctgtaagagaaaacattctatttggtcacaagttcgaccaagattattatgacctcactattaaagcatgtcaattgctacccgatttgaaaatactaccagatggtgatgaaactttggtaggtgaaaagggcatttccctatcaggcggtcagaaggcccgtctttcattagccagagcggtgtactcgagagcagatatttatttgttggatgacattttatctgctgttgatgcagaagttagtaaaaatattattgaatatgttttgatcggaaagacggctttattaaaaaataaaacaattattttaactaccaatactgtatcaattttaaaacattcgcagatgatatatgcgctagaaaacggtgaaattgttgaacaagggaattatgaggatgtaatgaaccgtaagaacaatacttcaaaactgaaaaaattactagaggaatttgattctccgattgataatggaaatgaaagcgatgtccaaactgaacaccgatccgaaagtgaagtggatgaacctctgcagcttaaagtaactgaatcagaaactgaggatgaggttgttactgagagtgaattagaactaatcaaagccaattctagaagagcttctctagctacgctaagacctagaccctttgtgggagcacaattggattccgtgaagaaaacggcgcaaaaggccgagaagacagaggtgggaagagtcaaaacaaagatttatcttgcgtatattaaggcttgtggagttttaggtgttgttttatttttcttgtttatgatattaacaagggttttcgacttagcagagaatttttggttaaagtactggtcagaatctaatgaaaaaaatggttcaaatgaaagggtttggatgtttgttggtgtgtattccttaatcggagtagcatcggccgcattcaataatttacggagtattatgatgctactgtattgttctattaggggttctaagaaactgcatgaaagcatggccaaatctgtaattagaagtcctatgactttctttgagactacaccagttggaaggatcataaacaggttctcatctgatatggatgcagtggacagtaatctacagtacattttctccttttttttcaaatcaatactaacctatttggttactgttatattagtcgggtacaatatgccatggtttttagtgttcaatatgtttttggtggttatctatatttactatcaaacattttacattgtgctatctagggagctaaaaagattgatcagtatatcttactctccgattatgtccttaatgagtgagagcttgaacggttattctattattgatgcatacgatcattttgagagattcatctatctaaattatgaaaaaatccaatacaacgttgattttgtcttcaactttagatcaacgaatagatggttatccgtgagattgcaaactattggtgctacaattgttttggctactgcaatcttagcactagcaacaatgaatactaaaaggcaactaagttcgggtatggttggtctactaatgagctattcattagaggttacaggttcattgacttggattgtaaggacaactgtgacgattgaaaccaacattgtatcagtggagagaattgttgagtactgcgaattaccacctgaagcacagtccattaaccctgaaaagaggccagatgaaaattggccatcaaagggtggtattgaattcaaaaactattccacaaaatacagagaaaatttggatccagtgctgaataatattaacgtgaagattgagccatgtgaaaaggttgggattgttggcagaacaggtgcagggaagtctacactgagcctggcattatttagaatactagaacctaccgaaggtaaaattattattgacggcattgatatatccgacataggtctgttcgatttaagaagccatttggcaattattcctcaggatgcacaagcttttgaaggtacagtaaagaccaatttggaccctttcaatcgttattcagaagatgaacttaaaagggctgttgagcaggcacatttaaagcctcatctggaaaaaatgctgcacagtaaaccaagaggtgatgattctaatgaagaggatggcaatgttaatgatattctggatgtcaagattaatgagaacggtagtaacttgtcagtggggcaaagacaactactatgtttggcaagagcgctgctaaaccgttccaaaatattggtccttgatgaagcaacggcttctgtggatatggaaaccgataaaattatccaagacactataagaagagaatttaaggaccgtaccatcttaacaattgcacatcgtatcgacactgtattggacagtgataagataattgttcttgaccagggtagtgtgagggaattcgattcaccctcgaaattgttatccgataaaacgtctattttttacagtctttgtgagaaaggtgggtatttgaaataatgacattgattattatatatgaagatatagaacatttaatgcgctgcaatatgtacggtcacgccaattctttttctttctatatgctttctagtaacccgggtaatcacaaatgaagctagtagagatataactaaatacaacttaattttaaccttatgttggattgctcaagcagtgttcgagaaagacagcggcagacagatagaaatgagctcaaatgaagaggtatttactcagataaacgcaactgcgaatgtggttgataataagaagcgtttacttttcgtgcaagatagctcagcacttgttctagggcttgttgcaggatttttgcaaatcgagtcagtccatgggtttatttggttcctgattctgtacaacttgattaatgtcatttacattgtttggatctgtcaacttcaaccaggaaagttctaccaaagcccacttcatgacatttttttcgaatcgttttttagagagataactggttttgtcatggcatggacatttggatacgccctaatcggatgaacatataagaactacttctataaacggttagaaacaggcttgatttattatgtacagtaaatataatgttatttgtgttttttttttttaaatttttttagttccttctatgtaaaaagacatgacaacagtattctcagtcaaatgatttcaaatacacaatgttaaattctctatctgttgcagaaataagaagagcgtaagagcgcaaagatttttgcagaaaaatagagatgaggtacaaaaagtaggtaatggaaaaaagcaaataatgaatataggggaacataaatgttatggacaagagtagatatcaaaataaaacaaaataaaatagagtaagtgaaagacaaatggaggaaaaaaaaaaaaaaaaaaaaaaaaaaaaaatagtaaaaagtgaaaggagaacgatgataacactaatcacacctccgcattttcaaccaatgctgcaagtttctcaacactggctaaatgtctatttcctagggagttagatttgtttagtttatccaaatatgctctaatggcaatgacgatcaatttcttaccctcaccctcagagacattaactaatttttgaatcacatagttggcaaattgatccttgatcattaaaatcattggagaatcgtcttccagattcaaagcatgatttttgtctcttggtaaaatcttagaaattattaaatccttctgatttttagagccataaagaatagatttttcgaccacgttggaggcaaatttatgtttagagtattcgacaacattattggccacagtttctatgatttcctgtttgatatcgaccatttccttattggtgaactgatcttgttgcaaaacatattgaatgacatagttaccatattggtcttgaattagatatggtatgaaatctttcaattcgtttaaaatgctttcctgatcttcgctcgaaccaaattctaacaatctttgaatgaccctacagccgtaggagtgggtagatagatggtaaatgtggccagttaaagaacttaagataaaaggtaatttttcgataggaattgtttcgatggccttttgaattacgtgattaccgttctgatctttgatcatttgcaaaacggagtcagataattccaggactaactcaattctttgattggaatcaatatattctaacgccttttgaattacacgacatgcgtacatttgtagagataactgtttcatgttacctttaaattgatcaaccaaagtatttttttgaattttgctaccaaattcaaaaaacttctgaatgacgtaattaccaaatacatcgttcgaaagctcaatggcgtcatcgcgaatttcattgaatatgacctccttttctgaggctggtgaggtggccaactcgcgctgaatgaaccgtgaaccatgttgatctttgcaaaactctaaggaatggccaaagatgtcttttagtgacatgttcgagtttgaatttttgtcagaactactgtttcttagttgctctaacaacggcgatcgatgatacgtttgctgctgttgctgtagactttgagaatgaggatgagaatgagagtgagatttatggttgttggccgttgactcattagatttggaagaagcattctttttagaggtattctttgtgggtatagaattttctagataaggatttgcctgtttgttggcgttgttggagttatttgcaggatgattcttgttatttcttttcttgaaggttttttcgtccttgggcattttgacaggtataggatttggagtagggtagtaaatataaggattctcctgttgctgttgctgttgttggtcttcttgttgttgttgttgttgctgttgctgttgttgctggggagcagagagtggtggaggtggcataaacatcattgggttggggtaggcaaacgggaacggagaattgtttggaggggacgaaggtgaagaaacagaagaaggtctgtttgccttcttctttttcttaccatttgagtcttcggtgtcttcatttgctggaatctgtactgaaatcatctgggagatgaaatttgaaggagatccgatcaagtagttggggaagttttggtaatgagggccctgatgaaactgattgggtgggaagccgttcatgtagggggggaaattgttatttgcaggcccatcttgttggttaggaagcgcgacatttgtggccccaacagcggctggattgttactaggtctaaatactggtgtgttggctacgttccagatatttctcttggggtaatgagcattttcggactctaaagacgcagatgagcctgaatttgaactggagtggtaaagcgaaccactgttagtagtgttcctattcaatttgttgaagtttttgtcagactcgacattttgctcgaaagtattctgtgtgtctaagctggcgttagagacgctttttgatatgaattgggactgagtattgacagcgtcgggtctatcttgagattccagttcccttgtaccgtcaatcaaagattttccgaacttctcaaaaaacccttccccaccagagttgttgttgtcattgccattgtagtaaacgggaccagcaatggaagctgaatactggcccagaagatggttgaccttgttgtttttcccgagattagccgcagtatgatgagtatgatagttattgtacgatgcggatgacagggaggcagtgtcggttgatctgtactggtaataattgccgccgttaccaaaaaactttttcgagttcgtggagaatggcggagcagtaccaactgatagggcggttttcttgaagatcggtgaagattcactggaaccgtgaagcagcaagatctctgaatctacttcatttgccgtggtgaaactcgaccttctgaagccgccaatttgctgtgatccagcagcaccgccgttcacaatgccggccgcggcggcctgaccgccgttgttgttactatgggacagggcgcttaaagaagaaactatggatgcgagttccatatccatatccatatccatgttcatttccatttatacccgcaatattgcgttattcagaagaaatttaaatgcgtagttcttgtttgttttcttgtttgcttgcgtacttctatgcttatagatatatcagtagcaaggaagtttccttttcaccgcctttcaatgttcctatctttttcttatgtttctctttagagaccagatgaccagaaaaaaattagctaagcagtgttatactatttacagtagatattcaaatatgtgcaggcaccacttatttttctttttccttcttttctttgtttttttttttctcctattcatcaagcttcatacatccaatatacattctcaagtgtgctaatggtacatttgggaaattatcttcctctctccacaatttttagaaggaaaaaagaaatgcagttcagggtaacagagtgcgcaattaccgtagatagcgatcggatgtttatctttagccctctttttctagctcaaaccccggcacgaattttttaggtcttgctgctctgccctcgggcacttttcttcgagaagttctggggcggtctgatcgggaaaaaacgttcccttttcggacgtatcgcaggcaatgtgcaaaagcttattatatacgagaaaagaaacgcgaaggaacgaaagaagatgaaaaaaatgcagcgataaaatgatattgtggttaatctaaatttatatatatatatatatatacatatatatatagaaatctattgttatacacaaaaatacttattttttaatatagatggctgcagataaagtaatagttttatatataggtatatttactgcacaattcacacgatgggtgtttctgcggtgttgaaaagagctaggaatttactagcaacgttcatagtctgctgttttatggcagtagtgcttgttctggcgctggcacaccattttataaatgagcacagagacactaggagttcatcgacccaaatcgaagttgatgacgaaagtaaaagaaacgtacaccatgaccatgttctcactagaaccaatgcatacgcgacgccatacctcgatctggaacatgacaagaaaaacggtatcgtctacgatcatacaagaacggttgtccgtaaaaagaaccacgaagtggggtcctcgtcactgcataaaaacctttttcacaaatttttgacaaagcttatttttaggtttatcgagaaggaaaaagttaccgaaggcgtaacgcaaggaaagttcaataatagtagcaatgaaattgccaatcatgaaccggtttttgaaaaaattcctgtacagtgcgacaatccattacagaatctaatcttatcggaagacttgacattagttgcggatcttaattattattttaaccagtacaatattcaaatagaggaatttagattggagaccgaagatgggtttgttatagatttgtggcacttgataccaaaatatagaacgacagattctgacaagaagaagaggccacccattttgatgctacatggccttttgcaaagcagtggttcgttcgcatccaatggtagaaaatctctggcatattttctgtatcaatccggttacgacatatggttagggaataacagatgcgggtttaggccggaatggaacgaagcgaaagtaccgacactagcttccaggtgggactgggaccttcgcgagatggttaagtacgatctgacccttttgattgataccgtgttagctaagacgcagtttgaaaagcttactttgatctcgcattctcagggcactacacaggggtttatgggcttggtcaacgaagataagtttttccctcccggttcgggatctaaagaatcttttttcacttctaagatcgcaaactatattgccttggcccccgcagtgtatcctggtcccttacttaacgagaaattgtttgttaagcttatgacaaaggaaatcgaaaatccctggttctttggtgaaacgagcttttttgagataatgatgattgtaagaaacttgtgcgttggtgagagcttgttctcctttgtttgttacaccatcttcaattacctgtttgattggaacgataccctttgggataccgcattaagagatcgccatttcctgttttcgccagtccatgtttcagtgaagttgatgcaatggtggctgtcacccgaccccaacaaggtaagttttaaatttggttcccataagatgttccccgacaatgttaagtggttttcagacgcatcaaaggccccaaatatctacttgtttgttccaaagcaagatagattggtggacggagaaagactaatcaatcatttcgtcaatgtggagtcgaatgtcaactacaagatctggtacattgatgagtatgcccatattgatgtcctatgggcacatgatgtcatagagagaattggtaaaccaattttacagaatttgaacaactattactccaagaagccatccagcgcctttgaaagtgattgttcggacacagaggtggaaacggagctggaaatggttgctgagaaggcttgaagaggaagcatgatatataggttaatataaattatacttgggaatacatagatagagggctagtaaatttttagtttttaattgttctttttttttgaagtattgtgtcacaaattgtcgggagttgggacatcaccgtgcataacgatacatttttttgaaaaatttgatattgaaaaaaaatcgatgagtttgaattacattacagttgtataaagcaaccgcatttcattaacgtagtttgactcgcgaagataaggcgttaaaatgaagattaagaccattaaaagaagtgctgatgactatgtccctgttaaaagtacgcaggaatctcaaatgcccaggaatttgaaccctgaattgcatccttttgaaagggcacgtgaatatactaaagctttgaatgccaccaaattggaaagaatgtttgctaaaccctttgtgggtcagttaggatacggtcatagagatggtgtttatgctattgccaaaaattatggtagtctgaataaattggctactggttctgcagatggtgtgattaaatactggaacatgtctactagagaagaatttgtttcctttaaggcgcattatggactcgttactggtctttgtgtgacacagcctcgttttcatgacaagaagccagatttgaagagccaaaattttatgttatcttgcagtgatgacaaaactgtcaagctatggtcaataaatgttgatgattactccaataaaaactccagtgataacgactccgttactaacgaggaaggtttgattcgtacttttgacggtgaatctgcatttcaaggtatcgattcgcacagagaaaactccacgtttgccacaggtggggccaagatccatctttgggacgttaacagattgaagccagtttccgatctatcatggggagcagacaacattactagtttaaaattcaatcaaaatgaaacagatatcttggccagtactggtagtgataattctattgttctttacgacttgagaaccaactcccccacacaaaagattgttcaaacaatgaggacgaatgctatttgctggaatccaatggaggccttcaactttgtaactgccaatgaagatcataacgcctactattatgatatgaggaatttatcacgttcattgaatgtattcaaagatcacgtcagcgcagtaatggatgttgacttttctcctacgggggatgagattgttactggttcgtacgataagagtatcagaatatataagacgaatcacggacattcgagagaaatttatcatacgaagagaatgcagcatgttttccaggttaaatattccatggattctaaatatattatcagtggatctgatgatgggaatgttaggctatggagaagtaaagcttgggagaggtctaatgtcaaaactactcgtgaaaagaataaattagaatatgacgaaaaattaaaagaaagatttagacatatgccggagatcaaaagaatcagtagacatagacacgtgccacaagtcatcaaaaaggctcaggaaattaagaacattgagttgagttctattaagagaagagaagctaatgaaaggcgtactagaaaggatatgccatacatttccgaaaggaagaaacaaatcgttggtaccgtgcacaaatatgaagattcaggaagagataggaaaagaagaaaggaagatgacaaacgtgatactcaagaaaagtagttattctgttttatgttgtctgtatatacacatatgtacaatatttgcatttttttaatttttaattcacatgtatttgataaatgttcacgccagtcccgttaaattaaaattaccattttattagattatgaatttatatatgaatacattgtgtcgtaatggtagaagaagttgaaaaaaaaaatgtcaagggacagcatgggtacagtgtgttgagccaaaaaaaaaaagaaaaaaaaagaaaaaactttttgttctctggttcttttcttcatcttcttcatcttcattctttggtagcgggggccacaagaaattcgggcgaaagtgctcattatattgttacatccaaaattttgcccacatccagtgaggttttcacagaaaggtcttctaaaagaggaataatatctaataattcgttatcatgagtatctgagaaccaggacgaaatcggtattgcatgttggggatgaaaaatataagatgccggagagttatcgagaatgatgatatctgataacggccttccaatctgggataagttttttatatagtttccttcatagttatagcaagcctctctgaataatctgtgatgaatgactttatctgtgtctaatatatcaagcaaaggatcaccgtatcgagagacactagccgtgaagactacaacctcgaataattttccgactctttccaaaaattcttccacaccaggtcttttaatgacatagacattgtgtacttggtcatctatttccacagacaaaacaaaatccgcagatcgtaagtatttgaaagaagagtgtaccaaggtttcatccaggtccagtattaggcatttcttgccctttgtactttcatcttgtggggggagcagagtgttgtaacctggtgcatgatactggccctgctgcaaaagcgttagatcaatatattcttcatcttcatcgtcttcgtcgtcggcatcgttggaagtttcactggcttgagagctgctacttaccctactcaaattcatatcttggataagatggtcagacgatacttgtacagtaggccctcgctgctgcgactgcgactgcgactgtgactgtgactgtgactggggttgtggttgtggttgtgactgttgttgttgttgctgctgttgttttttctgcctggaagtatctttcacagcatctcctttttcctgtacaatgccacgactgcgacggttatcttcatcgtcgatctcttcatcttcgtcaacctcgtatttttcctcgtaaagatcatctttactaattcgcttctctacttttgtcatattattagtagtagtggcggtgacggctgcagtcggcgacgatggcttctttttttcattatcgttcgtgcttatcccagatttaccggtggatcgttcagtggaactgaaagtagcggctgaatttgtcttagaaggaggagagtttgtctgatgtacgccacgggttcggcttttcgtgttggaatgtttaacgcttctgtttttattgagagaactgctctgttgttggcgataagcagaattggaattggattgtgtcgtctcggaagagcagcacagtattgacgatatgaaacccatactgttttgctacttattgttgttaaagcttacgaacacgaatgtaggcaaataaaaagcttggataaacgcacaatgaaaggggaagtgcgattgattatgctataaggaatgacacgaagagagcagactataggctaggcaggcgataaaggaaggagttgtacttgacgacaacgtaataaagagttcaatgaaagagtattgtgagcagtatggttcaacgagcacttcttctcgacacctatttctatactttttcacttaatatacactaactaatcccagacttttttttttttccgttctttccagaaaaaaaagaaacaaagcaagcgtgccctgacttagggtttcctaaaaaagttattaggtttgtgtcacgtgatacgtccttttctggtcacgtggtcttagaacactcttaaggggccaagcacaagaggacagtgctagcagtagaagtggtgtagtagtgatgaggtaatgttaattgtgcatcgcacatatttacaggtagtatatactatagtttgtgaatacctattcttatatatacaagaaatggttgtcggcagactgtcagtaagactaatttgcacttggaacttcgaagccataacccttcatgcactctttgtacttttcaatgaattccttgcatttttcagagtcttgtccattgaataagatgcatgtatcccgctcctccttttctggcttacaaacgcaacatggcttaggtttgtcctcgcactccgcgtggttttcttgttcttgtttcttgtcagtttcagtcattgggtataattgattgtgtagttatctgattgtgtacactaaaattttgtttagttgtactagagacaagtagttaggtggttactagattctgattcgccgctatatatcgtcattttatctttttttgaaggagataggtagggttataacattatccgggtaatgatttgaaaaaaaattttcaaaaaatgcgatgagatgaggttgaaaattgtaagttagaatatgcttagatagtatgagtatttacgttggtaacttgggtttcgaattggagctgtgtgcctacaacagcgtcttatatatatactatggtggtaggaactaaaaaatactctaatttggactttgtccctacaatcagtgacagtgaagacgatgttccaattctagattcttctgatgacgaaaaagtcgaggctaagaagactacgaagaagcggaagggtaagaataacaagaaaaaggttagtgagggggataacctcgatgaggatgttcatgaggacttggacgcggggtttaagtttgatttggacgccgatgataccacttcgaacttccaaggctggaactttctagcagagggcgagtccaataaggacgatgccgaagcttttgtgaagaaggacgttgacttggataagattattagaagaaaaggtgggctggtgaaaatggcccatattgatagtaaacaagaagaagaaaccgagaaagaaaaagtagaaaaagaaaacgatagcgacgatgaggaattagcaatggacgggttcggtatgggagctcccatgaacaatggagacgaaaatcagtcagaagaagaagaagaagaggaggaaaaggaagaggaagaggaggaagaggaggaacaagaagagatgacgttagaaaaaggcggcaaagatgacgaaatagatgaagaagacgattctgaagaggcaaaagccgatttctatgcgcctgaaactgagggagatgaagctaaaaagcaaatgtacgaaaatttcaacagtttgtctttatctcgtccggttcttaagggccttgcaagtttgggttacgtcaagccttcccctattcaaagcgccacaatccccattgccttattgggtaaagacatcattgccggtgctgtgactggttccggtaagactgctgcgtttatgattcccataatcgagcgtttgttgtataaaccagccaaaatcgcttccaccagagttattgttctattgcccactcgtgagttagctatccaagtcgctgacgttggtaaacaaattgcacgtttcgtctccggtataacctttggtctggccgttggtggtttgaacttgagacaacaagaacaaatgttgaaatctcgtccggacatcgtcattgctaccccaggtagattcattgatcatatcaggaactcagcaagttttaatgtggactcagtagagattctggttatggatgaagccgatagaatgttagaagaaggttttcaagatgaactgaacgaaattatgggcctattaccaagcaatagacagaacctattgttttctgctacaatgaactccaaaattaaaagtttagttagtctttctctaaaaaaaccagtaaggattatgattgatcctccaaagaaagctgctactaagttgacacaagaattcgttcgtattcgtaaaagagaccatttgaagcctgccttgttatttaatttgattaggaaattggatccaacgggtcaaaagaggattgtcgtttttgtggctagaaaagaaactgctcataggttaaggattatcatgggtcttttaggtatgagtgtgggtgaattacacggttctttaacccaagaacagcgtttagattccgttaataaattcaaaaatttggaagttcctgtacttatctgtacggatttggcctccagaggtcttgatatccccaagattgaggttgttatcaactacgatatgcccaagagttatgagatctacctgcatagagttggtcgtaccgccagagctggtagggaaggtcgttccgtcaccttcgtcggtgaatcatctcaagatagaagtattgtacgtgctgctataaagagtgtagaagaaaataagtccctaactcaaggtaaagcacttggtagaaacgtagactgggttcaaatcgaagaaacaaacaaacttgttgaatccatgaacgatacgattgaagatattctggtggaagaaaaggaggagaaggaaatattaagggctgaaatgcaattaagaaagggtgaaaatatgttgaagcataaaaaggaaatccaggcaagaccaagaaggacatggttccaaagcgaatcagataagaaaaattccaaagtattaggtgctttatcaaggaacaagaaagtcactaacagcaaaaagagaaagcgtgaagaagctaaggcagatggcaatggtgcacgttcttatagaaaaaccaaaaccgaccgtattgcagatcaagaaagaacttttaaaaagcagaagagtacaaattcaaataagaagaagggcttcaaaagccgtaggtaataattttcatcgtcattatcataaaatatcaacatacttatcactgtcattatattattaatactttgtatttaaatatcattaattcatctaataaacaggggattagtcaaaaattcctttttttttgttgaatctgtagaagtgagtattaataaactgcaagctatatgctatattaaaaggatttttcaagtacaaacgaactgaatggagactcaagctacttgcgggaaagaattacaaaattacattccattctagtaaaaaaaagttataaataaaaaaaaatcgtctgacgacaaatttgtatcttaatcaaaataaaaattttgggttactttctttaacgtttccaagttataaaattcttcatcttcgtcctcgtcgcttggttcaggtggaggcactatgatgtcctgacgaacgttcaaatttatcatctgaacatttttcctcaaatcaaataaagtgtctatttgttctttcgtgtcttctgatatatcttcatgctggaatggagatatcaatttcaatccgtctagccatatatatcttccctcttctgtgtctaaataaaatttcaaaactgtcctgtcgttacgatcttttaattcaactccagtgtacacattggcttcatctaatttgatgtaaacattactgctcgtccgacgactcggtgtagtaagttctatgcttttgaaagaggttatatgtttcaaaacaacaacttttgttctgccattagctaatgcctcagaacctggacttgttaaaattttattgtcgaatagataaggtaaatcgtttgtttgtgtttcgaattctctggctaataaatttgcgtggttatctgaaactatgaggaagtagactttaggcgtgccagcttcaggattcagtgggttctctgcgtaaacccacgttcccttttgcaattgaagaagtctttgatgacgaacgtaatcacgaacctggcctgatagcatggtatcgaagctagcgatactagatgaccaggttcgatactgttcttttttgattgagtctaattgtaatgttcttgcaaatttatatctcatagagtcaagtgcaacaacttgggtcttgagaagggatttcgtctgtattgctgcttccaaatcactggatgacaaacaaacatattttaaagtgataatagctaaatttaacagtgaaaccaaatcactttgcgattttgctaatgattctatccaaaatctcaaaaacaactcgagtgttttgtaaaaacatgtttgtcgattgagaacagcggtagcaatttgtaattttaaatcacgctctgagtctgagtattggttctcttttttcccacttagattgaaaagtcttctaaattggtctgaaagtttaaatattgcttcataaagagggaaatcgttctcgccaaacaacaattgttcagtgtaaagtctcttgaaagacccattaggactgtttaagaatgtgaatgtatcatacgcatttaataaatttatactgggaagatcgcccatttccatttctaaccctttttggaatacggagttatctttgatggctgtaagaagatcagctttaagcgaacaggaataatcatcaatactaaccgaagatagaaaatttattagcctctgctttaacggtacaaattcttcaaggattagtggttgcaagtcttctatgtaaagtaattcagacatggaagctggaaagttatactgaaatagcaaaatgaggattctgggtacaaattctacggcgtgtgatagtgatgtctcacataatgtaagtgagcattttaaaaatagggttatgcatagtatagtgtccgtaaacaacggtatatgaataggtctttgggacaaaagttgtaaaagtattccaatgagctgagagttctctctggagatgtggcagatgctcacaataacttcattcttattagaatcttggcatttaagggctacattaaaaatcctaatgagatttgctaccaacgtttctgaccttagcttttggcaattatcacacaatatagcccaaaatcgggaatctggaattacggttttacataggtatttttcatcacaaaggaggatatagtttgccaataacttttcgtattcatcacttgtcttgttcaaatttttattactgatcagcgtatgatagcaagcttttgattgtgcactcgtaagtgacttgactggctttcctaatttaggattcagtagcacttttatgttttccaagctttcatctggcatctgcctgttatgcttcattgcttatgccgttatttgaggttactttaatctattttcctactgatgacacaattgagtcaatccaacgtggaacgggttgcccttgtatacatttcagtttacttcttttcatgtatttccttaatagtttattttttcactttctgcctatccgtttcaattccgaagaaccgtcaacatccaataaagatcatctacaacaataagtgcccctcataattttctcaatgagatgaaagaactttgagagagtcaatataatacctgtagcctttttctgaaaatgactgatagtgagaatgaatccaccgaaacggattcgttaatgacgtttgacgattatataagcaaagagctacctgaacatttacagagactaatcatggagaatttgaagggttctactactaatgacttaaagcaaacttcaaacaactcagagtttaatgtcagtaaaaacgggagcttcaaaggtctcgatgatgcaattcaagctttgcaaatgcaaagcgtgttgcatccttcttcgttaggatcgttagcaacgtcctccaaattttctggatggtcgtttgctcaagggttttttgtaggacagctaagcatagtgttgttgttcatctttttcctaaagttctttatattcagtgatgagccatctaaaagtaagaatccgaaacctgcagcctcccgtcacagatcaaaatttaaagaatatccctttatatctcgcgaattcctgacttctcttgttaggaagggtgctaaacaacactacgagctcaatgaagaggcagaaaatgaacatcttcaagaactagctcttattttagagaaaacctattataatgtcgacgtgcaccctgcagagtcattggactggttcaacgttttagttgcccaaataatacagcaattccgcagtgaggcttggcacagggacaatatccttcattccttgaatgattttattggaagaaaatcacccgatctgcctgaatatttggataccataaaaataactgaactggatacaggtgatgatttccccattttctcgaattgcagaatacaatattcgccaaattcaggaaataaaaagctagaggctaaaattgatatagatttaaatgaccacttaactttaggagtagaaacaaaactattacttaactatccaaagcctggtattgccgcactccccataaatctagtagtgtcaattgtgaggtttcaggcgtgtttgaccgtatctttaactaatgcagaggagtttgcttctacttcgaacggtagcagtagtgaaaacggtatggagggcaattcaggatactttttgatgttttctttttctcctgaatatagaatggaatttgaaatcaagtcgctaattggctcacggtctaaacttgaaaatattcccaagatcggcagtgtcattgaataccaaataaaaaaatggttcgttgaacgatgcgttgaaccaagattccaatttgtcaggttaccaagtatgtggccacgtagtaaaaatacgagagaagaaaagcctacagagttataaatatttatgtacaaattttttgttctatctttttcctatcttctctgcctcatttttggtgttccagttttggttagtgcaagtggctattctccaagtgacaatcaccaaataaattcattgaatacatattaagatcgaatttcaggtgatacgacttctccaaaaatgattgttcttcttcagaaattcctagtttgtcccttggtagccaaatttcatccgaatttctacaaatggagaaaatatcatggaaagtataactttcttgacagaattggtccttcctttcctctgttagattcgacaagtattccaaagttggtatgcgttgaggcttcgattttatttgtttggagattttggagtgcgtgattactgttagagcaaagacaacaagcattatagttgacaatgtgtattgatcaaaaagagtgaacagcccgagtaaacaaaattccatgaaataaatgcccgcgtacaattgcataagggcctgtatgtacaatttaccgaacgtttcagaatagttctctttgttatattggtatttgaacaagtaactgaaagaaaagaaaaccatcgaaaatgagatgcaacataataataatataataggagcaacaacactgtatatgataccaatacagcccaacactgagaatataggataaatagatcctagttggaaaaataaagatgtctttaacctcttaaattgagcatgtggagtactccttttccatttatagtagaacaattcaaaaagtagctcttttattcttaacaaattaccgcctgcataagccattcccctaatcaaaacaaaagaacagaaaaagtttgcgcatttaggcaagtcgttggccaggagagcagggatactgacaggattgttaagaagcctctcaataattatagaaaatccagaagatattgtaacaactacgaaaagatgaatgaagacaaagacgaaataccaattctggacatcagcttctatttgcgctccagttttcaaccctcgaaggtaactcagccaacggaaaaagtagggtacgatttctattattattattaaggttactattggaatcaaattctttgccacttctcttataaatggagattggaaatgaattatttttgtaaacggtattagtgaggaaatatttggtatttgtgatattaacccaaggaacgcgacaggcaaaatccagcctataatcacaaaaattcgcaatatatttgccgagaaatatttggcacttttccaaaggggtgatgaatcgaggatatttctccaaataatgtcattaacattggggcctattattacttttaaattttgggtgggtagtctatacgaaagcaactcacctataacgtttgacaataatgtggacttgaaggtaatgaacatcttatccatataaatgtctgtgcccgacgataaatcgtcgggcagtgcctgcttggtttctgaagttgctttcaaggaatttacttggaatttaatgagtttttccttgcgtattattttatcaaggattctgtatttcctttctaatattgtttctgtatttacatacagtttagggtaatataacggaaagatgcttgactttttccagcgcagacgaatttttgtgcaatagtatgaaattctaaattgagttaaaaataccaattttttgtactgaaataatagatggtttttcaactttgaaaagaaaaatcttttgtgatttgctatcaaatgcctgtgtattgaaactcttctaaaatatttctctaaaataatctcaaagataatttgttcttttgatttttgtaatttatttaactttatttctaatttgtggactttcttcaaattttttggaatgaaatgcgtcacgccaaagcaatcactgtgtagcggctgaaaaaaagtttctaaagaaatactttgggtaaccaatttacttgagaatccttccaaatatagaatgttttggtatttacttttcgtcaaaacggaatatcctagtcgattaacgaacctcagttccgaagaaagaatgaagtgaaaccagagtacaacaaagatactcaaaaacaagtgacagattaaagtattcgatgaattaggtgatagatttgacatggtccacttgtcaagtttacttgtcgtcctgaaactttgctcataacgttcaccttcattttctttcaaaatatccctggaaaaataatggattggaattagtattggaatgttgataattgataacactgcaaaaaagaatatcaaaagtttgagaaaccgtaaaaatagataattgtctaggccatacctttcgtttcgttcgaatttttccataggatctaacattcttccgggaagttgcttgagaaatgcaaataatgaccaataattttttatttttttcttagcaaaacaaactttagaacctggatggattttcagaacgacattggcctgatatatagtcttgaatcttgatcttaaaataataaagagtgacagctgaaataaaaagtacaaaaaagaaaacaatataccagatatgaacccttttagtgagattccagcatgtctttgcgcagatccaaatctttctttgtcttgaaatttattcagtaaattaaaagtcagttctttagtagcattcatcttcttggtaagtctttttcttgtttttgaaaaagagttcctgaagtttgtctactgtgaatatactttgcacatttgtttaatttttaaacacgctataatttgtgtcataaagaattttttgtagaatagctttttttttaataggaaaaaaaaataaaaaaaggtggaaaagacaatcttttccagaaacttgaaactatactggagatgaagggttgtcgttggttgcgttacgagacaggcttgacaatttcacaagagtaatgtttcattacctgctgttttattatctttatatttagtaagaccagcagaaacgctacacgtgatgataatggaactaagcattctgttagatggtaagaattttttttaccttccattaccactaacgccttttttagtgtctttttgatatttactgacgtatttttccgcaccgtaatttgaagaaaaagaaaagtgacaaaagatggcattgtttacatacagagtcgtagtatcacaagagtagtccaacaggatgagcgaccttaaccaatccaaaaagatgaacgtcagcgagtttgctgacgcccaaaggagccactatacagtataccccagtttgcctcaaagtaacaaaaatgataaacacattccctttgtcaaacttctatcaggcaaagaatcggaagtgaacgtggaaaaaagatgggaattgtatcatcagttacattcccactttcatgatcaagtagatcatattatcgataatattgaagcagacttgaaagcagagatttcagaccttttatatagtgaaactactcagaaaaggcgatgctttaacactattttcctattaggttcagatagtacgacaaaaattgaacttaaagacgaatcttctcgctacaacgttttgattgaattgactccgaaagaatctccgaatgtaagaatgatgcttcgtaggtctatgtacaaactttacagcgcagctgatgcagaagaacatccaactatcaagtatgaagacattaacgatgaagatggcgattttaccgagcaaaacaatgatgtatcatacgatctgtcacttgtggaaaacttcaaaaggctttttggaaaagacttagcaatggtatttaattttaaagatgtagattctattaacttcaacacattggataacttcataattctattgaaaagtgccttcaagtatgaccatgttaaaataagtttaatctttaatattaatacaaacttgtcaaatattgagaaaaatttgagacaatcaaccatacgacttctgaagagaaattatcataaactagacgtgtcgagtaataaaggatttaagtacggaaaccaaatctttcaaagctttttggatacggttgatggcaaactaaatctttcagatcgttttgtggaattcattctcagcaagatggcaaataatactaatcacaacttacaattattgacgaagatgctggattattcgttgatgtcgtactttttccagaatgccttttcagtattcattgaccctgtaaatgttgattttttgaacgacgactacttaaaaatactgagcagatgtcctacattcatgttctttgtcgaaggtcttataaagcagcatgctcctgctgacgaaattctttcattattgacaaacaaaaacagaggcctagaagagttttttgttgagtttttggtaagagagaacccgattaacgggcatgctaagtttgttgctcgattcctcgaagaagaattgaatataaccaattttaatctgatagaattatatcataatttgcttattggcaaactagactcctatctagatcgttggtcagcatgtaaagagtataaggatcggcttcattttgaacccattgatacaatttttcaagagctatttactttggacaacagaagtggattacttacccagtcgattttcccttcttacaagtcaaatatcgaagataacttactaagttgggagcaggtgctgccttcgcttgataaagaaaattatgatactctttctggagatttggataaaataatggctccggtactgggtcagctattcaagctttatcgtgaggcgaatatgactatcaacatttacgatttctacattgcgttcagagaaacattaccaaaagaggaaatattaaatttcataagaaaagatccctccaacaccaaactcttagaactagcagaaacaccggacgcatttgacaaagtagcactaattttattcatgcaagcaatcttcgcctttgaaaacatgggtctcattaagtttcaaagcaccaagagttacgatctggtagaaaaatgtgtctggagaggaatttagataaagaatgcacggataaataagtaaataaataaccatacatatatagaaccatagaaccacgtttttgtaatgaacagtctacctgtatctcatcatttttctgtgttaactattattattattattatcgaatggagggtaatattatgtataggtaaaataaatagatagtgccatgatgcgcgaagattggcaatgggaaactcaagaaggcagcaacaaaaaaataaaggtggcctattaatcacaatctattgcctatatgtgctaggttatgggcaaattcggcacgacaaataaatcaacggagaatcttctgcgtgataaattcgtacccgagacatctccaactaatattcccactgatgtactcatcaagcaagggcaaataacggattccaccgaatcactaattcatggaggcgcagaaaggtatattgttaacgctttaaagcctatagaattaaataaaactgaaggctttttcgaagacccgccgttccatcttccttctccaccggttgattcgacaaatctggagtatgaagacgttaccgatcttcctaagaatggtttacgatatgatttgaatgatatatccgttgaggtaatcgaagatttataccgccagattgaagcttttttggttcatttcaaactatccagaagttttttacaaattttcaaaaactatgtcaatattcttattcaagaaggcatcaatcctttacgcgatgagtacttcacaatattggaagatgaactgaaaggttttttcactttcaattctgttatagaagagattttagaaatatttttaatccaccctcgcaacaaattcattgcattgtcccttgcagaatatacctacgctaagaacaaaatcagaagacattttaatcactggaagactgtatgtgaattgaatgaagaggcaaacaggtttgcaaatcaagcaaagctgagggtacaggaagccgtcttctatatttggagtgataaaacattaaaatactcacagatggccaacgatgaagctgaaagttttaggaatacttggctactatttcgctcgttccaacaatggataactttaacacaaactcttaaggagcagtcaaggttagcagatcaggcctttttgaataagatgtttaggaaaattttaaaggcacaagagcattggaaacacttagaaactgttaacactgacaacattaagaagatatttttacgaacaacatttcatatatggaagctaagacataaagaaataaactaccacgggttggaaagaaggattttcgaaagaataaaacagaaagttataaactatgaatacaataagagcattgcagaaaaagtgaggtcgttttctctacaaagaaaatatctgaataaatgggaaaagaaaaacattgaaaacgaagataaacttggggcactttatgaactggagaataaattcatcaaacaaaagttttttcgcaaattaaaccggtcatttcaacatagtcaacaagaggcaattgcaaagagtaaactaaatcagacacttttgaggtgcgtttttgagaagatgtggctgaaaagattcgaagaccatctgcatttgtattcaattgtaagtctaaaagaggctaacctcgtgaagcgtatttttcattcatggaaaaaacttctatatattgacctcaaagcaagcgattattcgaggactaatttgctcaagtcatcattgcgaagttggaaacttgaagtaaagttaaaaatatttgagcagaaatgtaaaaagagtattcaagcaagcgcgtatcgtacatggaggaaaagaatacagtatgggaaaatatcgagcgaacatgttaaaacggcattttgtgcaaaatatcttggtgtgtggaaaaggaggatgctacaaatgaattctatgaatgacgaagcatccaaattttacgaagagggtctcgtaaatgagtgtctagctatatggaaagaacgcctgattaaaactaaggaattggaggatagatacaatttcttatgtaagacacatgcaattttgactgtaaaacggacgctaatgcatattgataatgttcatttgctatatacgaaactggcgccctctatggatagagtaaagctttctaaggcctttttaaagtggcggaaagccacaaggttcaaagtcaggcataagttaaacgatattttacacgtttatgaaaagagtaaagagcgcgaacttcaaagccaactgttcaacgcttggcgaaatagattttgcttctacacagaagaatgtaacattcaggctatttcaaagagaaactaccagcttgaaaaaatggtgctgaagaaatttagagaaagacttttagagatagtaaaatcagaagaattagcagacgaagttcgcgaagaatttgtgttagtcaagacgttttatatttggaaaactcatctagacgaaatattttatatgagtacattattggaacaatcggaagctaataaacaattcataattacatccaaattcttgaaaatgtggagtcttcgattcctaaaaattaagcgtaatgatgagacagtcgaggtgtttcgtcatcggtgggacagggccactgtaaggggattgttattattatggaaaaatcgttcagacagttctccaaagagaaggaaggacttcaatcttaaacatgaactaaaaactcccataagatcagactctcaaaacgcctcaaccataccaggctcagaaagaataaagcagcacagaatggaagcgatgaagtcgcattatagcagggcaagaagagccataccaagtccggtgaaatcttccagtgttcttgattctacagctaaaaaacagatcaaccttgaaagtacgacaggcttaaacggatctccgacgcgaggaaaacctctaaggtattctcctaggcgtaccactagaaacatgccatccaaagttgaccatattgattttggcagaatacccgctgtaccttttagcctaagcgccaattctcctaaaatcgatcaagatatggattatataagagagcatgataaatccccgttaagtcgtaaacgtcaatagatatatatattatgtacgtatgtatgtgtgcatatgtagtcgtaacctttcttgcttctgagatgcatacaattactaataatattctccaggtctatgaaaacatcacaacatactatacttttcgtgttcgcgttgtaagctataatggaaaatggacgccataacgcattacttaacaaactacagtttgtcaatagagttgtccagtagagttaaaaggtcaattcaaccggtcttcaataagacatgtcactgaatgacttcctaagttccgtgctacctgtcagtgaacaatttgaatacttatcgttgcaatctattccgttagaaacccatgctgtcgtaaccccaaataaggacgacaaaagggtcccaaaaagcacgatcaagactcaacacttctttagtctatttcaccaaggaaaagtttttttttcattagaagtgtatgtgtatgtcacgctttgggatgaagcagatgccgaacggttaatatttgtatcaaaggcagacactaatggttattgtaatacgagggtaagcgttagagatattacaaaaataatattagaatttatattatcaatcgacccgaattactatcttcaaaaagtaaaaccggcaataagatcatataagaagatatcccccgagctgattagcgcagccagtacgccagcaagaactttaaggattttggctagaaggcttaaacagtcaggcagcaccgttttgaaagaaatagaatctccacgttttcaacaagatctttatctctcattcacctgtcctcgtgagattttgaccaaaatttgtttatttactagacctgcatcccagtacctcttcccagattcttcaaaaaacagcaaaaagcatatactaaatggcgaggaactaatgaaatggtggggctttattttggatagattactaattgaatgctttcaaaatgatacacaagcaaaattaaggataccgggcgaagatcctgctcgagtaagatcatacctaagagggatgaaatatccactatggcaagtgggtgatatatttacctctaaagaaaattctcttgcggtatataatattccattattcccagacgatcctaaggctagatttatacaccaattggcagaggaagatcgcctcctcaaagtaagcttatcatccttctggattgaactacaagagcgtcaagagttcaaattaagtgtcacatcatctgtaatgggtatttcgggatactctcttgccactccatctttatttccatctagtgccgatgttattgtaccgaagtcaaggaagcagtttagggcaatcaagaagtacattactggagaggaatacgatacagaggaaggcgcaatagaagctttcaccaatattcgtgattttctattgctcagaatggcaacaaatcttcaatctttaacagggaagagggagcatcgggagagaaatcagccggttcctgcaagcaacatcaacacgttggcgataacaatgctaaaaccgcgtaaaaaagctaaagccttgcctaaaacttgatacatattgatatttattatttagtacacgtatgtagcatcgatcttagaaaatgcatgtttgtatttattgttagtaccttgatcgccacctttctaggtaatgataggtcctcaacttttactacgcggtgcacgcctgtaaggtcgggcaaaacaaagtgtgggaacaataaataagagggtaggatgaaatattacctttactctactgctcaggttggccacaatttgctaaagagtttatcattaagtagctaccagcgaatctaaatacgacggataaagaatggctagtttagaagatcttattcctactgtcaacaagctgcaggatgttatgtacgactccgggatcgatacactcgatttgcccattttagctgttgttgggtcacaatcctccgggaaatcctcgatattggaaacgttagttggaagagattttttacctaggggtactggtattgtcacaagaagaccgttagttcttcaacttaataacatatctccaaattctcctctaatagaggaagatgataactcagttaatccacatgatgaagttacaaaaatatcaggattcgaagctggtacgaagcccttggagtataggggcaaggaaagaaatcatgcagatgagtggggggaattcctgcatataccaggaaaacggttttatgatttcgacgatatcaaaagagaaatcgaaaacgaaacagcgaggatagccggtaaggataagggcatcagtaagattccgattaatttgaaagtgttttcccctcatgttttgaatctaacgctagtagatttgcctgggattacaaaggttcctattggggaacaaccacctgatattgaaaagcaaatcaagaatttgatcctagactatatagccactccaaattgtttaatcttggccgtctctccagctaacgttgatcttgttaattctgaatccttaaagttggccagagaggtagaccctcagggcaaaaggactattggtgtcattaccaaattagatttgatggattctgggactaatgctctagatatcttgtctggaaaaatgtatcctctgaaattggggtttgttggtgtagtgaatcgctcgcaacaggatattcaattgaacaaaaccgttgaagaatcattggacaaagaagaggactatttcaggaaacatccagtctacagaactatttcaacaaagtgtggtacgcgttatttagctaaattgctaaaccagacattattaagccacattagagacaagcttccggatattaaaaccaagttaaataccctgatctctcaaaccgaacaagagctcgctagatacggtggcgtaggagctactactaatgaaagcagagctagccttgttcttcaactaatgaataagttttctacaaacttcatttcatctatagatggtacatcctccgacattaatacgaaggaactctgtggtggtgcccgtatttattacatttacaataatgtttttgggaattctttgaagtcgattgatccaacttctaatttatccgttcttgatgttagaacagcgattagaaattctactggtccccgtcctacattatttgtacctgagttggcttttgacctattggttaaacctcaaattaaacttttactagaaccatctcaacgttgcgtcgagttagtttacgaggagctgatgaaaatatgccataaatgtggctccgctgagctagctagatatcctaaattgaagagtatgttaatagaagttataagcgaactacttagagaaaggttacaacctactcgctcttacgttgaaagcttgattgacatacatcgagcctacatcaatactaatcatcctaattttttaagtgcaacagaagcaatggatgacatcatgaaaacgcgtagaaaacggaatcaagagttattgaaaagtaagttgtctcaacaggagaatggacaaaccaacggtattaatggtacttcatctatctcttcgaatatagatcaagattctgctaaaaacagtgactacgatgatgatggtatcgacgcagaatcgaagcaaacgaaggacaaatttttaaattatttctttggcaaggataaaaagggtcaacctgtgttcgatgcatcagacaagaaaagatccattgccggtgatggaaatattgaagattttagaaatttacaaatatcagatttttcactgggcgatatagatgaccttgaaaacgctgaacctccactgaccgagagagaagaattggagtgcgaattaattaaacgtctgattgtttcatactttgatattataagagaaatgattgaagatcaagtaccaaaggcagttatgtgtttactcgtcaattattgtaaggattctgttcaaaacagattggtaaccaaactctacaaagaaacactgtttgaagaacttttagttgaggatcaaactttagctcaagatagagaactatgtgtgaaatcactcggagtttataaaaaggctgcaacccttattagtaatattctgtaattgcataattcatctcatttttgatcttacttcaacattgcgggcgtgattataggtcagtgtttattcctttactcagttgatgatttcaaatgtgctctcctctccattctttttcttgttaataaaaatccataactaaataaataacaaatattagcaatcgcaaaagtattaactaagctagagaaccttcactagagaagctctacctaaaggtatagaacaggaaaaagtgtttttattttggcggacttcgtggaagattgccttccatcaataataagcgtagtccataggtacgatcatttcctttttaaccgttaagcaagcgacaagatgtattttgtttaccagcgaatgctcttatttatcttctgcgcctttccaataatctaattatcaatgctacgaatgattatagttttaactagatgaacgaaatttctaggttattaaagagtacgttatgcatcaaaagaatatcagtcataataagcagatagaccttctacatggtttgtagacaaccaaactggtgtatgctaatatcaacgagtaaacgcttacttttctaaagttgaatatttgaagtacacacccgcgtaaagagtttttaccccgaaaacaaatttttatgcttgaaaaatagctaataaaatgtttttattgttcggataacaaatacaatagtgttattaaaaaataaaacttatttaaaaatagtaatttaaattattattttattttaataaactttttaataatatttattacacgtgatttaatatatcctgtttttttttcatcattctctttctttcttatgttaacctcgtactacaagttttctccttataaaaagctgactaaaattagagattgataatcataaataaatttagtagccatttccatttttacattttgatttaatcgacactcaaagttcttatttgaaagctagtttagaacttatttgtttgctccttgatgaatataatgagaagaaattccactcagattaaatatgaagattgttaacggcaagacgctaaaagaaaaggaaaggaagtagatgatggcaaataaggtcactttcttgttagttacatatactttcacagaaacttgaaaataaccacaaaacttaaaacgaacgttattttgttcaattgcttaatttgtgaagatattatctactacttaaatgatatattaacacttatgaggtactgacactgcgaccgcccttttgatctgatcccacccttcgtatatctctgggggtttgtatagcgttcacagaatatgaaccttcaaaagtgggttgagaaagtggtgataaatgcgctgttgccgagtaagaagggttgtggattatcggagagtgttgaatcagtggtgttgttgctcgatcatttctccctctttgatttttgtcttttacttttccacccctggtaattattatgcaaaacaataaagaaatggctatggtaacacctattataaccccaaatccaaccgctatccctggcaagcgcagatggtatttctcgctgtttagccaagataaggatatgggtttgtcgatcagaaatatgcatgaacttttcaaattagtagtgcatcctgttttaagaactctaacttccttggtccagtcgccctgtatgctaacaaaaacgttgtccagatgatcttttctgcagtttagttttgtacctagtttagtgctaatggagccattgcagtctagtaggttttgcgttacattagcaggaatcaaatggagttcgaggaattttcttaagtttgtcgagttcgccgtgatgccacttaatggaatagaagaagccgttggaactaaaagcgagtactcttcgttattccaaatgattgaagaaaggtcataaaacaagttaaaaaagtcaaatatttcttttgttccagtagtttctatcagctcttttagggatatctccaaatcgactggaaaatccaattggtctataggatggataactccctggttgaaaaatatatcggaactctcctcaataataatactttcctttatagtactcactgagattttcgtaaggttttggcttcccacaattttttgtacgccaatagatacagaatttccgtataaattcttgacagtagtcgaaatactataattgttggaataaataaggtcttcgaagattaggttcctcataagtaaatttagggcggttttgtttgacctcaaatagtctatagtcaaatcattattgtcccatgaattcatacatggaagaagtatcgtgtaccccttatgatttgatggtagatccaaaaggttaagttccttcaagagcattagggaaatagaacagtggttttctggtgctaatgacaacactaagtcgcccggtaattgaagatcatcgtcaatagaataaatggacgtattaccaatctcataaggttttgtgtttaaaatcttgaagcgaccattgatgtaataacctttattagaccttgtgattttgaacttttggcagtgtccacctagtcttttagctgaagagcaaaaggcggagtcataaatttgggtaggtgcgtattgaatcgggcgcaatgaggaaaagtcctgttcaaggtcaattttaccttctacaaaatggtacagaagtgatggttttgtgtacccacgatcctcattaaaagaggcttgtggtacaaatatggtgattttccttccgttttgaatgaatttttcaaggtctctgaagtataactcctttacgaattctgagcagttcaaaccgtgcaagtacttttcagcatcaaactgtatatgcgttcgtaaaaagtctaagtcagaaaatccatgcacgacgcctatttcaaaaattctgtttgatatgggtgagtaatctgaattatttacacttactgatgtaccttctgaattactcttcataaaaagttttcgattgtttttattttctaaaattagttccttgggtaaaataccaccatacacgtcatcaataatgagttcttgaagaagggaagttctatctgcggcccatttggcctgagaaattgtattagatttacccaatttattatatttgtcaagtagatagtttatttcgattgtattgaagaattttcgaaaattaacatctaagggcactaaaactgtggatgagtttgtatatgcattatagtttgaaaaactgctgataaaatcactaaatatctttaaatcttgggtttcttcatctagttgtaccagcaactcatttatttgaggttgaattagtaaaagattgttaataccttgtaatgaagcattctggaaactaggcagcaaatcgggttcgacaacagcaatttcattgacaaagcaatggcgctcatgctttctcagcaataaaggtgcttttgcagctcttttctccaggtaggtaccgttttcaaggtctctcacttgcaataccctatcatgaataaggaaatcttcaatatggaaatgctcctcaaattggtctgtggtttggtcccccttaataaatgctgaattaatcggagcaaaaagtgtaaagttctgtagctcatttaagtactgtacgtgaccagttttctgaataatccttaaaaaagttgagaattcaacattttctgagaggatatctattactgtgctaaatggaaaatcgtcccctgggttttgtagaagtgcttgtgtaagccctaatatcggcagtagccaaaaaatgtatttaattgtttggattgccatgttcatcaaagggctccgtttgattcagttaatacatgctgtcactcacagcagcttagataagaagccgttttgtcttattttctaggcccttaatatacgcctaatggggaagtccgaccgaacaaaattctcctaccgggttttcacggtaatgttcttccataaaaaaagacaatatagtaagctgttaatattgatttggtgaacttgaatctgatatttgtttctattgcttacgtataatacttttgcggtaattcattcaaatttcatacaatgctaatatttatacaattctactcgacacggcaaaaatgattggctaacgataatcgtggctctttatatacttaatatataggatctagctatttagaacactctttagatctagatgatagagagcgtagcccctttgtaactacaggacaataatgcttttcaagaagagcattatcccataaggttgctgcctctgggttactccttgaaggattatcggcttccattatgaaatgaccgttgcctattctatcctcggaagagtaaaggcctgaaatttctggatatctattcattaatttatcaataaatttaagaatggcaatacttgttttttctggggtatggctgatgcacatgtacaatcttttggtaaacgccgtagccctttctttagtccctgatttagagcggaaaaatacatggtccagagcctttagcagaagttctgctttggtagaaacgttaactgatggttttattatttcgttattgagtgggtcagccaaccttagcgatctataagataattcgatgtctgcatcaagacagatataaggtaatagcgcgtaaagcccatcgacgaatttggacaaatccacattaactttcatatattgtgtatttgaaataagtgagaatgcactaacgatacaaagcaaagccttacggacctcagcagaggaaaggttatcgaattcagtgtcactaataagttctttcattacttcgaggaagtcccctaatagatcaaagttggccatattaccaaacttcgttagaccttccaaaaccgatccaatgagtgtttttgcattgtttttcaagatattcaaatatatagtgaaaacgatttttagaatttcggattggtttctttctctttcctccgcagaaacagcttgctcagcgttacgcatttcttcctcaatttgttgcatctcttttcgagcttttctttgcttcttagaaagatggaccctatctttctttttgagcttaggagcgctaacgttacctttcaatttagtattagggtcatagtcatgtaagacatctaacgataataacatatttaaaacagattcttcgatgttgaagttcctcgtctttagtattttgttgaaaattcttagtatctcgaatgatattgagccctcttcgtcctcatttaatagagtttcaaatgtctggattatttgaatggaagttggatctgttgaaattcttggtttacaaattctacgcaacagtaaagtgaaaatgtctgttctaaagttgaaatgggatgccgttgaaatcaattcttttgcggcttgagtggccaaaatccctaatgaaacctgtataggagcagcattactgggagtttttgaaagactctgtaatcttccgacgtaatttttgtagttataaactaaggcttgctcaaagtttctaagcttggagacttctttagaaactttttccttcttttcagtttcagttagtggtcgaattctatagcctggtatgatactcttaaacacggggaccaaagccaacatggaaaacttacaagtattaggatttttagattccaccattttacatagacgccccaacgcagcagtattttcttcaggctcctccataactttagtgactaaatcggcaatgtcttcttttagttgcagaattttttcctccgtatcaggctcatcctcctttgcctctgcttcttgttcttcattaggtccctcatcatcttctgaagagtcattagagtcttcgtcttcctcatcatcgtcctttggtttttcttgggctttatgcaattttctttcaactttaccgttaacttttataggcaggccttcaacaagatttgatgtatcagaccgattcttccgaggaaccatttcgtaatcctgttcttcttcatcccaggatgagccttttgcgctatatatggtattttcatccatatcttccggtgcattttggaaaacattgccttctaacaaggaatcttcgtgctttcttttctttgcagtcctttcctgaatgcgaaattgagatctatttctcttagccattattactatgatatctccagcttttatcccggaattatactcttatgattgaagacataaaatgccaagtttataccatgaaaatactatatatggcaggcaggtgaatgagatgagataaaattttcagttttcgggcatcgctgaaaaaattcaaaaactaaagtaaaacgacgtcccatggtctactctacggtgaagaaaatgagggaagacattgaatttctgaatctaagtaactacaaaaaagcatacactccatggaaagagtaaaataggataaattggttttatgtagttaaagaaaaaatacattgttatatatggagtttgctgcgcgcctaggcgttctcgaagtttctcctttgattttactttttggaagggctttggacaatttaaagaagataatttgaagtaccccatcaaatgctagaatgaaatatttaatatactaaattaaggctggtatttaaaaacgtaatcttatgtgtagaacctcagtgaaaaagcgctattattaatataacagtattttcacggagctttttttattcaaaaaggttttcaagacttggcagaggacggctgcattctcgaatgataatatagtattatccttaggatctaaataacttgcatcaagaatgatatctaacttttccttaccttggaaaagtaagtcagtagcttctataattttctgcattcttgttggagtggcaataaaatatagtgaatctttatttttgtttgattttttagagctgtcagtaagtaaacgttccacggtggctatgtcatcctttagtttacttttagagaataatttgacgcaatttttgccaccgtttagactacgataaacgtctgctactctaatattagacatagaaaaaacaattttttttggagctacggaaaatttttgaataaaggctgggaaattgcttaatctgcgttcagcgtcaaatttttctgtcgaaagaaaatcatttcttttgaagtaaagttcctctaattctaaaacactcaagtcaggatttttttctcgtatcaaagttgttaggtactcaataattttttctggtgaacttgctggaagtgcttttcgttgtgagacgatatactggctttcctctttctttttctcaattagctttgattttttctgtagctttttctgtcttttcgaaataggtctattcgaatcatcttctgaatttctctcctcttttttcccatctatatcatcaacgtcatcgtcatcttgttctatagacctcttttgtacctttttggttgggggactaccatccttggcgtcaaaaattacttcatgttcggcatcaaaatcataggcgagtccatcatctaaatcatctggattagacattttcagctcaattgtcctgacgatatgtttagaagttagtagcggggatcaaatttcgactttcattgcctcatccatggtcatctcaaaaattttctcttcaattttttggtaaataccaagtgcaatgaatgtttgggtgtctttgaatattgaatattacagactaaaaatattatatattgtaaattaaaagttgattattagtaaatgtacctgaaatttctgttttcgatatcagtcaagtccaaaaattggtacttcttcctttcttgaccttcttgttccttatcacgcttttcgttctccttcttgcaaatgtagccaatgtataattgtaggggaacacaaacacactgagtgaccaataaggcaatctttgctggtatgtaacgtggagcagagtatgccctaaacatctgtggagcaataatacaggagacattgtatacaatcattgtaatagcatttctaaaaactcttttggtgtaaccggaggtgttgcatgaattccagatgtaaatattggtaatgacacaggaaccactgtaaagcaagtacagagaaaataagttaccgatcttatgggataagggtaaactgataagaacgatacaacctataatagctggaatatacatagatgtggttatgagtgtgatatgaccccagcgggacaacatttgagttgttataagaataatcatagccgtaatggcaccaataggcaactgcagtaatgctgtttcgtacttgtcgaaaccaaaagtaccagtgatggtcactgaaaatgtaccaatggcaccagtagaaatttgagaacatgcagttaataaaagcatcggccaagtaaacttatcatgaaggaatagttctttaacttgctgcttcttaaacttctttgtttccaggccagtttggttagctctgatatgctcaacaacttgaattttttcctctttgtttaggaaccaagcattggtgacgttatctggaaggtataagaatgttagaacaccaaacgcaactgtaaccagaccaacgaccaaaaacattatttgccaagaggtgaaagcggtaccatgataatgtaaaaagccaaaagaaattaacccgcccacaatataacctgtaccagcctgtgtggcccagaatccaattcttgcactctgttcagatttagtatagtacataccactaatagcgatacaaccaactgcactcgaggattcaaagagacctaggagagtacgaacgaccatcaacgaggcgtacgtcttacaagcagcatggcaagccaacacgataccccagacggtaataaaagtacctaggattttggaaatggggaatttttgaattaagtaagtgaccacaggttccatgaaaatgtaagcagcagaaaagatagtacccaaattagaaaattcgttacctttcaaatgatctttgatacccatagatgcagcgtagttcagcagagccttatccaaaaacatcagaagatatgtacagcataaaaagggcaggatgaagaggtcaacttttctcaggaccttaggagataattcatgggaaccatagaagttggcttcttcgcctgctacaacatcgtcttcattagccgtggagctttcgtcgagaccgttctgtttcaggaatcttaaagcaacgtccgcatcgtctacattaatgctcgaggtacttacggaacaactatcagcgttagctgccttcttctccacgtccatggatcgttgtgacatgtttttcattgtattgatttgctgacactctcactacttctcagcaacaacaaagtaaactttaatctatcatactttgaactatcttatatacgtgtatatatgcacccgctgagatgctcatcgagattgctcatcacctctgaaaaggctgtctgtcaccaccatgttttccgccggaccaaatgacagttccttaagggaaactcaaagagactatattaactaaggaggatcaaccagatatgcaaaaaaaacaaatagttatgacggcactcgaaccaaccaaacaccaccctataattaatgttgataatgatagcgactcgaaatttgccaataaaacctgtctattacgcgtcatctacttgagagtaatatactggaagttcgagatactccgcacagggtctgggtggtaggtttctttgctattgtatagtttttcaagatacgtaaaaggtcttcatcttatcttatatagatgcaggtgattactagtggggcaagtcggcagctaattgcgtgtgtgcggaaggattgtgcagtagaatggctcctgtagttatttcagaatctgaagaggatgaggatagagttgccattactagaagaactaagagacaagttcattttgatggcgagggagatgatcgtgtagaccaacagcaacagcagcacagttcaagccacagggatagggataaacatgtgcagcgtaagaagaagaaaaggctctcgaatagaaacctgcaaggttcaaatggtgggtacgcttgggaggatgagatcaagagaagttgggatttggtgaaagtggacgatgaaggggatatggcatctcttgtggctagcatagtcgaggccagaaagaaacgtactgctaagaaaaacataacgccataccaaagaggtattatcagaagtttaatattaacactagattgtagtgaagctatgttggaaaaggatttgagaccaaacaggcatgccatgattatccagtacgccatagattttgtccatgaatttttcgaccaaaatccgatatctcaaatgggtattatcataatgagaaacggtttggcacaactggtcagccaagttagcggaaacccgcaggatcacattgatgcgttgaaatccatcaggaaacaagaaccgaaaggaaacccttcattgcaaaatgcattggaaatggcaagaggccttttattgcctgttcctgcgcattgtacaagggaagtactgattgtatttggtagtctttccacaactgatcctggagatattcaccaaactatcgattcgttagtttctgagaaaattagagtgaaggttttggggttatcagctcaagtggccatatgtaaagaattatgcaaggcaacgaattatggtgatgaatccttctataaaattttactcgatgaaactcacttaaaggagctatttaacgaggctgttacccctttacccgttaacaaaattaataagggtttcacactcgtaaagatggggtttccgacaaggatattcgaagatactccaactttttgttcgtgccattccaagttagtttacggcggatacttctgtcccaattgtcatagtaaagtttgttcattgcccacagtctgtccatgttgtgacttgatgctaatcctttctacccacctggccagatcatatcaccatctgatgccgttaaaaacatttgcagaagtacctacaacagaaaaatttcgatcagaagactgctttagttgccagtcaagatttcccatactgaaaaaccataaaaatggtaaactactgacaagttctcgctatcgttgtgaagattgtaaacaagaattttgtgttgactgcgatgtgttcatccatgaaatccttcataactgcccaggctgtgaatccaagcccgtaataacttaacgaaaatctgtcagcgtataacacgatcactcttccatcatataacaaatccaagtagtagagaacgaaatagtttttgatggacatataactacataattattacaaaaataacctcatttaatgtcctattgtttattacgagaaaatcttaatagcacttacggcattaagaatatttattactattttcaatttatcaggcacttattcaactaaaaaaaaaaaaaaaattctttgttttacaataatattaataattattttgaataaatatcgttacattctatcataatgtcctctacacggtacaaccaaactcacaattctatttgagtgggcgagaggtttgaattttttcttactgggctgtgtgtaggggtcatagatgtcgcttgtttgaatgagtgagggttggaaggtgcaataggtttctgtggagatttaaccaaaacactgtcggtcatccggctttctccctgcttccagctgtcaaaatcaatcaaggcttgcatacatccccactctgtaattttcttactaagccagtgtaaattcactggtttagtcaggtagtcgttacaaccagaaagaagtgcttttcttttatccatctgagagttagatgcggtcaatgctacaataatcacgggcgcctgagagaatctctttgaagtacctttttcaagattggagtgtgagttattgagacttttttgaatgccaatgccattttgtttttcgaagtccctaatctgcttggcagcttctataccagacaagacaggcagctgtaaatccataaatattaaatgaagaccgccttccttccaaatattaacagcttcttgaccatttttagccagtttatatgagattttgtgtttcctcagaaaggaacctaagatagcttggttgatgacgttgtcttcaactattaaaacattaattttggggaaaactttttcacttgtggtggtaaaaaggtttggtaaaggatctggtggagaggaaacagcaaaaggtgcgttataaagcgagtttgagtaatgcggcgtttgactacttgttaatattggtgatgcgggcgtaacgtcttcttttcttctttgtacttccgacatgggttgcgttatgcctataccagcttcattaagtgatccgctttcttgcgaaggggatccggtgttcacttctaactctgaatgagtaattgtgtcttcattattgaaagatgaatccgtgtgggccactggtttatttcgaaaatctacccctcctttataaccttttggtaacagcaagattgcttgccaaggagactcggcatccttttcctcatccttcagttcttgtgacgctcttctcaattgctcttcatcagttattaatttaaattcctgagggctgctattgccatctttacctttaagatctgctttatcaccaattgtttgcttaagaccttgttcgcccggagaaatatggtcgtctagatgaaaaacaccaacggccccatggtctgttggttgagttttctgctgcgaaatttcttcattcgtaggaacatagtctacaacatttaagatatctaaaggcggtacatcctggcgtaaattaacattcgaaaatatcagcaaaggctgcgatgcaggttgggaacccatggttccgaatagttccttatatatgttaatagccaattcatccggttcaaagatgattttataagtgcaatcattaactgattctgtggtaaaatttaaaccttttctaatcaacggccttgtgtatttatttttattatgcggtgagacgtatgtaagaccagctgatgccataatttgattatcagaatgaaatttagggtagggtgagactgaggcaaatcgcagtaacggacttttagttgttgctggaaactgtttaggactagtagagtatggtctttgcgggcttagcattggcgcctcgttgggaggaaaatccacattggtagtcgcggccactgtcggcacggcggcaaaggcgtcgtataatgctcctcttttctgcgtaggtttaggatgctggagaacattcctgtcctttgcaaggtcttttgaaagaccaaatgatcctgctgtggggctcactgaactcttggtattgctattaacggaaaggttggcgccacttccagcaccgttactcttacttcgacaactattatcgttagtgttgttactactggtattgtcggcttgattgtcaaatttaggtgcgtagaggcctattgcaatggaagcattatcgttaatttctcgccatcgagtcgaactcagtttctgaaaaaacctgctcttcaaatcatcaacagtatctatttcatcgaactgtacagcaattggttggtttacttcatcagtggagttgtctattcgtagccaaaccttccacagtaacgcagaattgagcatttttacttgtctccccaaaatcgattcgtttttgatttacagcagcctttccaatatttcttatacaaaacggccgaacttgtactcaaaataaacgctattctgaggtctaaaactaacaaaacacgtaatttttctgaataaaacaatgtctccaactagttaaccacagcttggctagtttcaatgtagtcattcctaacaaaaaggcaaccagacctatttataaatatatagccactattaaattcactagaaaaaaagtcaaagattcaatccaggggcgcttttagggcttcggaaagctgaaaaaaatagttaggacactgatatcaataatatagggaatttgaattattggaaaatggaaattaggttaagggataccaaaaaaagaaacgcgataattataggcatggagatgagaataataactatatatgtatgcggttcggtacatattcattgctgactgaagtctgatagtagtcgtggcgaatggaggtacatgaagagcaggtctctgcacctgtaacaggggatgctacagcaaaatatctgctgcaatatatcttgtcagcaagaggcatttgccatgaaaatgctctcattctagccctaatgagattggaaaccgatgcttcaacgcttaacactgaatggtcgatccagcagtgggtcgacaagctaaatgattatataaacgctataaacgtaaaactgaaccttttgggttacaagatcattcggatcaaccacgggattggtagaaacgcagtgactttaaaggccaagcagaattttgagtccttcgaagataatacagcaataagggctcacaataatgattatgcagttttgcaatcgatagtacttccggagagtaacaggtttttcgtatatgttaacttagcatcaacagaagagactaagttagccacaaggtttaaccaaaacgagatcgagtttatgaaatgggccatagaacaattcatgatcagtggagagactatcgttgaagggcctgcactggaaacctcgataattgtgaaggaagtcaaccgtattctagtagcagctacaggagactcaaacctcgcgaaatggcgtaagttcagtacgtttactgtagggtccaccaatcttttccaatttcaagaattaacagcaacggacatcgaagacttactactccgattatgcgaactgaaatggttttacaggactcaggaagggaaattcggtattgatcttcgctgtatagcagaactagaagagtatctaacatccatgtacaatttgaacacttgccaaaattgccacaagctggcaattcaaggtgtcaggtgcggcaacgaatcatgccgagaagagaatgaggaaactggagagaatagtctgtctcaaatttggcatgttgattgtttcaagcattatattacccatgtaagcaagaattgtgatcgttgcggttcatcgctaatcacagagggcgtatacgttatttaaactaaaatacatagctttccgtgttatttacaagacttatctatacaaacatttgattgcccgaagtattttaatctcctaaacggcatgtgattgaacacggttcgaggtttataccacttgtattaggcatatatgcaattgcaataactcattttaggttcccgttttaccttatttgctaataccccttttttccaaaaagtccttagcttcgtttatcttagtggccaaaaatggagaaccacctttgtcaggatgattagctaacataattttcctatgaacctctttcaacttttttttagtcaatgtattttctgtcaaattcaaaatctgtagagcctctttagaattcattttcgggtcaaatccgcctttcaagaaggcagtagtggattttccaccgttaagtcccttcgatattgatttatatgcaccggctgtaaaatataaagttaaaaaggccccaaaacctgttatcacaggatgttctcccatgtagttcaaagcttgatcaaaataaaggtccattccggtcttttgaccctgcgaaccattctggataccgacattaacaccagctccatcaacagtaacgttcgcagagccattagtttgaccaggaatgggtagttgtggtgcctcaatagaattaccagtattactttgagaactcatgatattgtgcgggtggaagtgtttatgcaaccttattaaactgtgctcggccagtggagacgtacaaattccactactattcgtactttgtctagttcaagggtctccgtcgagtgagtcctacgttgattcaaatggctttcacatttggtccgattctcgctctttaaattttttgcccgctcgcctcgaactcagcggagtgaaaaattttcactcgtcttttattaaataatgtatttctaaactcatctcatctcatcccaccctatctccaacttacatcagtttctatcttgatccgtgatataccacttttaagttcttcgacttgtgatttgaaagatattgctattcaagcgtgagttgtccatattgttaccaccacctccccgtgatttacattcagaaactaaaaggaaaaggaagtagaagtttagtaagtataaaaaaatgagaatttatcaatgccatttttgctcatccccatgttatccaggtcatgggatcatgtttgtgcgtaacgatgctaaagagtttaggttctgccgttctaagtgtcacaaggcattcaagcaacgtcgtaacccaagaaaactaaaatggaccaaagctttcagaaaggctgccggaaaagaattggctgtggattctaccttgacttttgcccaaagaagaaatgtccctgttagatacaatagagagttagttgccacaactttgaaggctatggctagaatcgaagaaattagacaaaaacgtgaaagagccttctacaagaatagaatgagaggtaacaaagaaaaggacttcttaagagataagaaattggtcgaatctaacccagaattattgagaatcagagaagttgaaattgccagaaagttggctaaagaacaagaaagagctgaatcagtatccgaacaagaggaatctgaagaagaagaggaggatatggaaatcgacagtgacgaggaagaggaagaacaattggaaaagcaaaagattctgctaaagaacagaagaagaaatacaaagaaaattgctttttagttagaacagaaccgggctaattgcctctttcctttcttttctcatacttatttcatgggataaataagaatcacctgtatactattatttacattacataacattacaataactattttcaagggtcctcttacattcttatcaaaggtattatataatctcagtatatgccaaacgtctgacttaggagttagagatgttcagaaacttctcaccaagtggtgatttgacaaattcacagaaatcacgaacgtcattcctggatagtatcttaaaatcaatgatttcaaaaattggcggactttggtgtattccataccataccccaatgcgaacatccagtacctgcccatttatcaatctcaaatcatctttatgggctgaaaataatctttcgctcatatacaaacgcatctcctctgcgccatttgttgaattgaggcaatgaagatttctaactatcatttgacagaaaaaacctttaatgaattcttcatccgatttacagaacaagaaatctactaatcgaacaacaatcctgaatcttttggacggatgaataatgtttggttccattccgtttccaccgtaaacattgttatgaatatcgtaattcgttgctattttatccttcaaacattttaagtctagaactaactggctcatataacactgtcgtagttctctaaaaagagcaaatagagctgtatgtaaccaatacaatatagtgaattatgtcctagaataagggcattcattattctccatctctgcttcagagaaaaaaaaaagaaaaagaaaaaataacgacaactgcaggactcgaacctgcgcgggcaaagcccaaaagatttctaatctttcgccttaaccactcggccaagttgccatatgactattgatttatatcatattacgagcccaaataatactggggtgttttgacaatcctaatataaacagtcttcgagaagtaaccagttgtcaaaacggattatcagcttgattcaaggaatgttaactgtcctatatcatataaaatatgaatcatactaaatggtggaagcacggatcttggatctaaactaattgttcaggcatttatatgtttgggtagtttggctaagggaggccgggttttatctcatgttgttcgttttgttataggattgtttcatatgtattttatgaacgtttaggataatgtattgtcaggctgacgtatctcattttgagatacaataatttaacctattttatgttaaatattacacaagatgataaatatgtcaactaaaaactttaacgccgagcttggccattacaatatagagcacatgctatgatcaaatgaattagatgaatacaagccaagaaagcatttttttaattacacttcatgcttttgttggaatgaaactgtaaaataccatctgtttagtagtatttgtgttaccagtataccgtcacatgcggtgtaacgtgaggacataaaaaagtcatcaaaattaatgtccccacgttacactgtatatgacagtatatactactgacatgaatactagtcgatagttaatacatgattcttattacaacatgatgattacagtctcgtcttggtctgttgtttgaccctactattttatgctattttttgtatctgatttgaattcaaggcaattgttgtaattccattcttggcataaccctgtgtagattctacagataagctgcttttttctttgagtggtgcccccgttgtttattacccgtcagtatcataacatttgagcatctcacatggttacgaatgtaaatatgaatcaaagaaggtgcaaaatcaaaaaaaatcgaaagatttgacatgcctattgaaaagggaaagttgtatatctatcaattgttaattagttacttggtcatctccattaccagctgaggtgcttagtcgacaaccgcattaaacatgaaagtgggtattataatgggttctgtgagggcaaagagggtatgcccagaaattgcagcatacgtaaaacgtacaattgaaaatagcgaagaattaatagaccagaagctgaaaatacaagtagtagatttacaacagattgctcttcccttatatgaagatgatgacgaactgatccctgcgcaaataaagagcgtggatgagtatgcagacagcaaaactcgatcgtggagtcgcatcgtaaatgcattagatattattgtattcgttacacctcaatataattgggggtatccagcagccttaaaaaatgcaattgatcgtctttaccatgaatggcacggaaaacctgccctggtggtaagctacggcggtcatggcggtagtaagtgtaatgaccaacttcaagaggtactacatggtttgaagatgaatgttataggtggagtggcggtgaaaataccggtaggtacgataccgttacccgaggacattgtaccacaactcagcgtgcacaatgaagagatcctgcaattactcgcatcgtgcatcgaaacaacgaggaataaataaaccataaaatttaactgtagtcgcaataaaagatgaaaagctaacacaattatcataggacactgtaatccagactttaattagtattaagtattgagtacaaagtacaaagtattatactaacggtagtttgggctcttcgattacccatacacttttaatggactaatttcatcaagtttcattcgaaaattttcttaaaatatatatatgcgtagtggtatagtattcatatttcatgaacttatttcataaaaaaagataaagcaaacctaatatttggatcggcgctcgaaattattctcagtattcttcagcattagacatctttaacatatcaatctttaaaaggtttcttcttcttctgtagctcggaatataagcattcatatatgaccatgttgtaacgcgatcgaaccaagcaacttcttcttgtgcaaatttcctagcaataccaggcacacctccttgacgatcaaatgcaattctttcagtctcttgttcaaaatctttttgacataaagccaggtatttttcctgttgttcaggttgcagttgaagatactgctggtaggtgatttctttgtaatagacagtcttcatttgaatatgttcgagactttttctcttaatctctatgaatattttctgtcttgaagctgccgtcttcatagaatgttgttctattatccacctcgaacatggcctttttatacgtttttacattaaacatccccttcatattagtttgttctcgacttaattctactcatgcttctgacattttttcatgccaagaccggccctgaaaaagggtccggatatacggatagcgccacacattcaattaggggaagtattatttgatacattgtcagcacacagcgatttaacccattatttggcatgacaagcaagctattcgacagtgaaaaatgcacagaacattcaaaattatacttataatatgactcttttcttttattgcagttggtattatatacatatatatatatatatatatatgtatatgttccccgagacaatggttttatttccaaaaaaagtgtaagtaagttattttctgtgtataaaaaaataaaagaagccagatgaagtgccaggtggcgtaccaggacttcagctttctttagtttgcataatgaaagtatcacttacagctcccttgaaggattagacgctattaaccccgatgaaaacgcatcaacaaaacctttaacacagtacttatttggtgcaatacatactcacacaaacacctgtagaaaatccccttatatgaaaatcccttttttttcttggcaagtatttctgataaaatgcggacaacattacctgcttagccgcctgccacagaaaataagtaggcttctctgtaaaatggaataataggctagaggtcaaaaacctcctcttcagtcatatctatgtttttaagggtctagggtccaatttgatggaaaagaacaaatggtcgagcatgttaattaatatttgttgctctgtttgaagagtatattataagacgagaggttctttgagggagcttatcttaccttttcttgatttgaaacaatttcattaaatgtaaacaattatcaactagaagcaaatataaagccagaaggaagaatttgctatgaacattaagactttgtgtcatccagaatataaaagaatctccgttgaatcgttattgaatccggtagaggagacaatagactgcgaaaaacctcactctcaaacaaaaatcaatactgctaaacccattagtgcatctttgtatgtcacaacgaataatactgctgttgttcagcacaatgtccaaaagaggaaaggcgtcaccaggagatgtccacagtgtgcggtgataaaaacttctccgcaatggagagagggtcctgatggagaggtgacattgtgtaatgcctgtggattattttatagaaaaatatttttggtttttggcaaggatctggcaaaacggtactttaacgaaataaaaggtgtgagcgtcaaacgaaaagttccaaagagcctctatggagttacaagaacgcgttaagagaatttatttctgctcggaatgttatatacttatgtcaaagcagtgattatacatttatcgactttaaacagttgataacgaacattatgtgttattcgaaagtcaaagtgccatacaaaacaagtggtttctcagttcttgcaatttttctttatcagcgtagtcccagaaaaaaaaatcatcactggaaatgtaagatgaattcaagtatcaagtgccgttggtattatagtttatcaattaatacgtaaatatatatatatatatatatatatatatatatgactatagtggcatacttctcaatggactgttgcttctatcattttatacatgcgttcaactttgaagattatcacaaaaacctcaaacttttcaattaatctgccccggtcatttaagttagctcttttaggactctcatgttttcaaaaaatagattgaaaagagcattggtggccctactttcaatccattgatcatgattcttcgagctatcgctaaaatattccaccggattcagagttctttcctttactgatatcgtaagaagactcgccttcgtttccgttaccagacctgacaaaaaactcatcccatacagatcccgaagtaacctggaaaaggatatccatgatatcttgattattggtatacgactggcaattcaatgcagaagacgtatttgtagaagcactttcatttatcacttgattaccttcgcttacatctaaagtattaaactgggaaacattgctgtgtttttccagttcggtaaaaaattcatctagaggtatatcaaaaggtgctttttcttcaaaattggttctattaaaaaccttgttatcaaaagtaccgtcgtcaaaaccaagtacgttcgtttttttatcataacttgacatgcggtttgcctgagaggttaggggatttgaatccgaaaatatccctttggcatcatttatttgcataaattttaactttattacaactgatgataaaattttgtaactcgtgtaacaggttttcgcagattcgcaaaaacctatcagattcttcagtactatcaacactttttcagtgtactctgacactttttcttgacaatcatttatgttgttttttgagtaaaaatttacgtaaaggtaagtcatacctgtcatgaacatgttatgaactgctacccacgtgtaaccaatttttttattgacacaaagattgtaaaatacgtctatggtgcccttcgtactgtccaggacaattttaaaagcggtatcattcaaagtagggaattttggagaaagtccataaagaatgctcttcgagtaatgatagttcagatcaaaccagatgctgttaaatttgcaattcatcatctcaaagtttttgggaacgtccacttggaaccaacgctcaagctcattgtaggtttcaatccgccagctctcgagatccataaacctcctcggcaattctgcaccgggcgcgtagagtattctcactatactagcttggattcttctgattttatacatggccaatgcgataacttttgaagacggatttgggcttggtaagtctgagtagtcgtcaatttctcggttagttaatgtgatgaaggaatcgtccaaaaggctaggatacctggtggtgatgctttcttcaggtataccaaaaggtcgaccaaaatacgagcaaatttgccgatctaaggagtaaacgcaccaaaatagacgcctgcgtatttctctggtaaaggcgtcataatttttattaattttttccgaatgtagtcctaggtcaaccgttagtcttagtacagaacccatagtataccaaacaccggggacattaggtctcattattgaatagattaccatgagcaaagtgcctgccaatgcctccaacctgtctgaagatgaaaataaagatgcaatatatttagtagcgcgtctcttatatgtcgcgacagtagtaatatctgacttaagtacctgcgtagcatggccaatagcaaatataatgtttaaaaaaaaataaggtatgtgaaattttgtcggtagttcaactatcggacgcatgttgactttttgagatgtctcccaagtgtcataccatggaacatccacggaagagcatacgtcaatcttctcagtaacgttctccctttttggttcagtatgcgcactaaaagcactggtaattggaatttcgaacgcgctatttatgcctgtctgatcagatgccaatgcaatattgggattccagggaccataaataggttcaaagtattttttcaggaaaagttctctatgcagcaaaggtaactgggaattagtatctacaaaaaacctggatatcataacttcagcggcatgtcgaggtggtagttccaatggatcaaagtgtggattgttttcagcctctgcatatccattgtatttctgttccctttgtttaatatcttcatccagaacgtcatctccggaatcttgacgaaaattagttgccgtgaagactaatttcgcaaaggaaatacccgatgaatctcctaaaaaagagttaaaactactttctctcatcgtgcccagcgcactgatctccttattacatcggcgtagctcttccgctcttgcatctgaagtcatagggctgcctgtctcgggtaataaagcgctaccatcttgtttttttgagtttaccagaaattccttgcgttgtacatttatagtctgtgggcttgccatagacttgctcgttatagctgaggatgccatagaattccctttctgaaccaaataatccgccaataagccattatgtggcaatattccctcttctcccaaagatgaaactgaactgtactttttcaaatcaaaaggttcatcatcacttgtagcaggtatatttcctcgtattttcgtgggatctactccatattctttcaacacacgcatcatgacagccaatctatcttccagaaaaaagacgtaagatcttggaacgtcctttccggtggctgggtccaaagaaacacatggtacctctaattttgcacacctcttacagctaggaaactcctgatcacatttaatttttttcaatcgacatcgtttacatgcagttctagatttggaaattcctatattaggagaatctcctctttttgataaatctgttctattactttttttggagttaaattttttctgcttcatgatttaatcatcatcttcgtatgttttatgtactctaaagggttactcctgtgcgaataaagcaaaccactttacgttactaaaatttttcacatttggtattgtgagtattttatgaagctcatcgcggtaaaagaaaaaaatagagaatctgtgattatagtttaaaaaggatgtagacaaaggatatcagcgataaaggtggccataattggacgaagacaaataattcacttccttaataatgaagttgggtattataccttaccaggaaggtactgatattgtttacaagaatgctctccagggtcagcaagaagggaagagacctaatttaccacagatggaagcaacgcaccaaatcaagtcatcggttcagggtacaagttatgagtttgtccgcacagaagatattccattgaatcgaagacattttgtgtacagaccgtgttccgcaaatccctttttcactattttggggtatggctgtacagaatacccatttgaccactctggaatgagcgtcatggacagatctgaagggttgtcaattagtcgagatggaaatgatctggtaagtgtcccggatcaatacggttggagaactgcaagaagcgatgtgtgtattaaagaaggaatgacgtattgggaagtggaggtaattcgtggaggaaacaagaaattcgcagacggtgttaataataaggaaaatgctgatgattcagtagacgaagtacaaagtggcatatacgaaaaaatgcacaaacaagtgaatgacaccccgcatctacgatttggagtttgcagaagagaggccagtttagaggctcccgtagggtttgatgtgtacgggtatggtattagagacatttcgttagaatctatccacgaaggaaaattgaattgcgtcctagaaaatggttcgccattgaaagagggtgataaaatcggatttctactgagtcttcctagcattcatacacaaatcaaacaagctaaggagtttaccaaaagaagaatttttgcactgaactcccatatggatacgatgaatgaaccatggagagaagatgctgagaatgggccttcaaggaaaaaattaaaacaagagacaacgaacaaagaatttcaaagggcgctattagaagatattgaatataacgacgtcgtccgcgatcaaatcgccatcaggtataagaaccagttgttctttgaggcaacggactatgtaaagacaacgaaaccggaatattattcttctgataagagggaaaggcaagactattaccagttagaggattcatatcttgctatctttcaaaatggtaagtacctaggcaaagcatttgaaaatttaaagccgttgttaccaccgttcagtgagttacaatacaatgaaaagttctatcttggatattggcaacatggtgaagctcgtgatgagtccaatgataaaaacacaaccagtgccaaaaagaaaaagcagcaacaaaagaaaaagaagggattgatactcagaaacaaatacgtaaataataacaaactgggttactatccaacaatcagctgttttaacggtggaacagcgaggataattagtgaagaagataaattggagtacctcgatcaaatccgatcagcttactgtgttgacgggaattcaaaagttaacacactggatacattgtacaaagaacagatagctgaagacatagtatgggatataatcgatgagttggagcaaattgccctacagcaataaagcagcattcaaagaagaataattaaaacacactgaaagtgtgtttcttatatatggttatacattcatgaagatgagttcgtaatcgttatcttcttcaaattctgaaagtgtaaggacgtcaccacttcgtagctctatatatctcgctccaggaattacaacgttgttcaaacatgtcccattggacgaatccaaatccattacataacatttcaaaatgccacgaacgttcctgaactggatgacgcagtgctgctttgaggatgtttcttcgggtataccaatgtctgcgacaacgatctccgttctatcgtcgagatctgtatccagactgtggcccagttcacgaccgactaaataacagctcctgccgttcaaatcgtatcttttccacggtcctttatccttgtcattctttctgtatatcactagttcatacatagtcctatctcgcgcctccagtcctagcatatccatgtagttatctggagaaatagcgtcctgcggctccacatgttttaaagctataccttctttgttattcgactccagctctaacagaccggaagggctgaagtctggcataatatcgatgtactgcgatttgaatttcttgtcatcatggccataatttctggtgttataaggtcttttgcgtctgtgaaacatgtctatacgcaaatggagtcggaaatgaagtacaccatgcttgctgtggcttttacgttataccaaggcttctattgtaggacgcctttattgtcaattatgtgaaaagaaagcaaaaaaaagaaaaagaaaaatgaaaaaagatgaacgtgtgaatgaaaaaaaactatttcgagatgagatgagattaaatgaacaggattaagaatacattttctgttgctaagagattaaaactaagcaaagttatgacgaactcagaattaccgagcatattcgaaggaactgttgatttagggattattggtggtacaggtttatataaccttgactgtctggagcccatcgctttgcttccacccatggtaacaccatggggtaccacatcgtctcctgtcacaatctctcagttcgtaggaactaacagccactttcacgttgcgttcatagccagacacggtattaaccacgaatacccacccactaaagtcccatttagagcaaacatggcggccttaaagaacttaaattgtaaagccgttctttcttttagtgccgtggggtctttacaaccccatataaagcctagagattttgtgttaccacagcaaataatcgacagaactaaaggcataagacattcttcatatttcaacgatgaaggcttggtaggtcacgttggtttcggacagccgttctctcaaaaattcgcagagtatatctatcaattcaagaacgagataacaaatcctgaatccgaagaaccgtgccatttgcattacgacaaggatatgaccgttgtgtgtatggaaggcccacaattctccacgcgcgctgaatccaagatgtacagaatgtttggtggccatgttattaacatgagtgttattccagaagccaaattggcgcgtgagtgtgagctgccttaccagatgatttgtatgtctaccgattacgacgcatggagagatgaggcagaacctgttaccgtagaaaccgttattggtaatttgacgaataatgggcgcaatgcaaatattttagcttctaagatcatcgtctcaatggccaaggaaatcccagagttcatgcatactggcgatgggctgcgcggttccatcaagaaatctatctctaccaaaccagaggctatgtccaaggaaaccttagaaagactaagatacttatttccaaactattggtaatggttgccgctaatcatatgtaaaatataaataggagagaaaacatatatagctatggaaagtattaaatgtttttttgctgtttttatattttcccccttggggactgtgagttcatcatatatgcatatttgctacttggaatgtagcccttcctagttacaggggtatgcggcgagttattgtcattgttagcgctcactaatgtgctactgataccgctatgcctctgcagtgtgccaaatacattctttgtgtgtaaggattgagattgtagtttcgtctgttcctccgccatttccctttgtcttgctttcaaaggcgtctctaagcctttgaagagatatgctggatgatttttgagatttgtttgaggaatatgtgttttgttctgtgccatttggctgatcttagaagtggatacgtagtgggggtgttgtggctgcaacccagtatcgacagatgattgcatgtctacccccaggagcttcttttgcctgtcagtgagattcaaatcacttactttgacggtggataagagcttccaaagagaaaacagtatattgagcgagattaataggtggaacaagtagtcaagaagttctgcattcaaccaactgaacgtggtgtgatatatgatgttagccttctttaacgtgtgaaatgtcaacatgtacagatggattctggatagccggttgcaaaactgtctcccaacatgagtgttgttccaaaagaacttgatgaacttcaccagcaggttccagaacgcaaacgcaattacgtttgtcataattctctgcgtctccatttccttgtttaccgttcgccgtgatagctccttgagcacaggactttcaaagttgcccaatttaaacattggtgtgtcattttgtgattgtgatgagggtttgctgtctgtgtccggcaatggtcccggcacgtcattatcgtccaggcccaattggcccgcctgaatcttcatagttccctctattatttttttgcctctgcggatatattaaaagtctgtatattgtcaagttcttataatataaatctttttgttcatcataaccatcttattaattgttattatttctatcattattactattagcacaaatttcattttttttttttttcatttttctttagactttagccctaattagacctgagaaatattattataacctgagaaaggtttataaaaagaacattataacctacaaaaaagatacttaaaccctgaagttaataggtttggaccctctttttttttttttgcttttttttagaaaacctcagtattcacagtctaaggaacagataaagagaagctttatgaaagcagtccacagtgccacgaactttgacatatataattgacttgtgggggctaccgactggcttatatttctaaaatttagagatttgattatctttttcgcagcgcgtaaaagaaacccacgaagcatcgcttaatttacacatattcttcgttctccccttttggagaggatttaagctaagatatatctttcttcgagcgcagtgctgcttttgagttctttcgttttaattttccacttatttggcaataaaaactgagtgaagagtgcttctctgtctgttttagggagctttttcagatcatcatcagatgggatttatagcaaatatactgtgctgttcttcagatacttccaaaacacatcgtcaacgccaaccaccagaaactaatcacaaccgcaaccgcaaccgtaagcacagttcaaacaaagctcaaactcagggtcgtaagcagaaggctactccaaacggcgacaagatgcaatattccacaccggagatccttttgtctagttccgattcaggcagcaatgcgggttccaagacaatgcaggagaatgggaatagcggcaatggaaaactagcacctttatcaagagatcactccaacaactcgtacgatgaggagaaagaatatgaagattataatgaaggagacgtagaaatgacggaggttaacaatgccggagaagaagaagaagaagatgacgaagcaaaagaaaagcaagaccatgtcgttcatgaatataacgttgacgcagatagaaattccagtattaatgacgaggcgccaccacaacagggtctgtatcaggtgggtcaagaagatatgaatccacaatatgtcgccagcagtcctgataatgatttaaacttgatacctacaacggaggaggacttctctgacctgacgcatttgcaaccagaccagtaccatgcccccggatacgacactctgctaccacccaagttgcaagaatttcaacagaaaaaatgtctgatattggatctagacgaaactttggtacattcttcctttaaatatatgcattcagctgatttcgttttgcccgtcgaaatcgatgatcaagttcacaatgtctatgttattaagaggccaggcgtcgatgagttcttgaacagggtgagtcaactatacgaagttgttgtgttcacggcaagtgtttcgaggtatgcaaacccccttttagatacgttggaccctaatggaaccatccatcatcgattattcagagaagcttgttataactacgaaggtaactacatcaagaacttatcgcagatcggaagaccattgtccgaaacaatcatcttagataattcgccggcctcttacatctttcatccgcaacatgctgttccgatatcttcttggttctctgatactcatgataatgagttactagatattatcccacttttggaggacctttcatcaggaaacgtgttggatgtggggagcgtgttggatgtgacgatatagatttctcagtaacataaaaagcaggctctttttattaccccccccttcggttatatgtttggacgaactcatgtttctctttttatacagaagacttcaccggatatttataaacttaatgaattaatttgcttattacatgtatcaattgtactttacgtgtaacatctacagatacatatatccgtatatactagcatatatataaatatatactctatacatatatctatttattatgcttttctttcctctttttatggcatattatattttacaaagaaaccacaaagaaaaaacttttacctcaccttgcattaggaaacctcaaattttctatcattggcttaccaattctatctataacatcatgcgcccataaaacgtccagatgggaatactcatcaatataccagattttgtacactgcatttgcttcatgattaatgaagtgattaattaatcgttcaccatctactaatctatcttgctttggaataaacattataatgtgtggaaattcttcactattttgtcttttcggatttaagtgtagtttgttgttatccaaattattgccactgtcatcatcattcttggcaataggaaaccatgtctttttatctggaaaaattttctctgcacccttcttaaaacttagcttattaggaagaggtgacaaccaccattgcattagtttgacggaaatatggactggtgaaaataagaaatttcggtcccttaaaactctatcccataagacatcgttccaatcaaataggtagttaaacatgatgtatgagaggaacgaaaaaatcttggtcccaaccattagttttctcattgtcatcataagaggtataaacgatcttctaccaaagtaccacggagaatcaataccttttgccattagcctcacaaatgctttttcatccaataaaggtccagggtacactgcaggtgccaaagcaacaaagttttccagcttatcgactaatttaaaatcacttgcgtatagtttctcaccgttgacaagccccataaacccttgtgttgtaccttgtgaatgcgccacgagcgatagtttagcatatccggtactatcaagtacataatttataagtgcttttaaatcgtattgaaccatctggtgcatatcccaatcccattttttggaatgatcattacctaattttttcatgttccacttggcatttaagccacatctgttattccccaaccaaacatcaaatccagattcataaaggaagtatgccagagattttctacctgaagatgcgaaggccccgcaactttgcaaaagaccgtgtaatagcaaaatgggttcacgtttcacttcctctacgccatcgtttaacctggacttgaagtgccacaaatcaatgataaaaccgtcgtctgtctccacctcaaattcttcaatatcaataccatactctttataatagtactttaagtcaggtaccagcttggtatcctccgcaagcgcaatgttttggaagggattctctgcagcatatggggcttggttcacattcgtttccattttaatattagcatttccatcaccgttctctgataaagaggcattactagtcatggacagcttgctagtcacagtacggtcatattcaatattattttcctgatcccgctgtaaatctaagggcgttgtggaagatattgacaaaggtctagagtgacgtgctggtcgtttcttcttcttgtcatttggctggatcttggttctcgaacttcttgtatctcttggatcatttttatgttggaaatgaactgtcacgtaattcttccatagtgacaaaatgaataaccccgtcataaacgaagtgagaattattgcgctcaccaaccgctgaacctcatcaaccaccttatttaccatgcttatcgtaaaggtgccacggggatcccaatgatagttgagtatttcccaacaattttaattatacctttgatgagaaacatttgcgtactatttgtgtgaaaaaaaatgaagaacttaatgcgcgaattattgggataacaacgccaatggtgaatcaaaatattaacaatgacaaaaagaatgggctatttttgtacaaaatactgttgcaaatatgatatcatatgaattccaaactcatctaccgaaaggaaaagatagctcattgaacgcttcatccgaaaacaaagaattgtatgtacaagccacgcactttaataacacaattctattgcaaatcagactaaatggggaaatggattccacctatgaggtatcttcaaaaggactaaacccaattctcgatatcaacgtaccactggcaggaaacctaggaaacacgggtggcgattatgacgatgaggaagaagaatttgtaagagaccatttatctgattatcaagtggttaccaagttgggagatagtgccgatcctaaagtacccgtggtatgcgtacagattgccgaactatataggagagttattctaccagaagtgagcggtacgatggcccaagacaacatgcaattcagcttgctgatatccatgagcagtaagatatggagagcaacgaaggaacaaagcgctgacgataatgattttggcaaattagtttttgtgttaaagtgtatcaaagatatgtatgcaaagtgattctatataaattagttatgcgttgtattatctatgactgccatatccaagacttgcacagttccctttttatcacatagggtcatcaaatctctataattgacaggatcgataagacctgtacatgtccaaggatccaattccggcttcgttgactctccaggcgatgaagctatcaatttactaatcttctcaataagttcgggttgtctagatggctcacttatggccactttgactttcatcttcgcccttactattggaataatttgcttagaaaccaataatttgatagcctctaaagcttgcaatttggcaggtttgttaataacagggctgaacttcagttcctgtaaagctttgtggatcattgtgggcggatatcttttctttgacacaggatttatacatttagcgctaactattgtaagcatttcgttattaactttattaagcattaattgtctttctttttccgataattgaatctctcccttatgcatgatctcctcgatgacatcatcaacatttgtagtcccgaaacacttttgtagatcttccttattagcaaccaagcctttcgaaacattcatgaaaacttgatgtatctgcagcacttcatccagatctttttcaattccttttcgatagtcttggaccttattttggtagcacgcgacttcaaatctcttgcgagccttttttaatctcactaatgaaacattagttaacttaatctgtcccgacggttgattgataggcattgcgtgttttaccttttctttctcagaactattttagtaaaaattttaaaaacttttactactgcatgaaatcacttaagttcggcctagaaaaattttttcatgaacattattatatatacaaggcactgagcaggacaatacacgctaagttttgttctttcatgaggtcataataagttaaataacagtcaatacataaatgcaaaactaaaagtacacagttttattattttcttttcgtcgtaatgtagtttttataatcagtcaactttttttttgcttttagatttcgtttgttccttttgtctttggatccaaagtttcttgaaaatgtagccaaaacaatgccagcaggaatatcgaaaaagatgggtataatataagtaaaaaaaaaattttaacaatgaaataatacaggagaattcgtggtttacaatttctggtttttttcgaaattgctatgtggcttctccaacaatgtaattgtaggcttttctttcttttaagtccgtttatcgtatacagaaaaagtgcaggatgttgtaagtaaaggtagtcagtcataccatcatgacaaaatccacctcttggcaaacatatctaaaatagctctataatggccgatgacacccaacactacgaagaaatgccaaaaagtgtgcgaacaaccaaaatagtcaacccaccatagagatttaaatgatttggcatgagacggacaggaactgcatttggaatgggctgttggcacctctctaaaatgaatttccctttgctttgtgatgatttctaaatcagtagataattcgtagtttgttggaatggtcttatcaacctgaacgtcagatctgaaccgttcaggaatgaacgaaccgtaaaataccacaccaaccaaataccaaacaacagatttgtatgtgacggggctaaatagcgttgcagcataatgaagatcagtcaaaaatatcaaatgtaaaaacgacaatacacccatagtagccagcaaaatgaagaatctaattcttaatggccttgcttcaggtctatcaaagcgaggcgaccaattcataaacacaccaaatacacccagcgccagagaaatactcatgtaagtgtacatcgcccagtaacatgaatacatggtaacaaactccgttgtcaatatcgaagctgtaattaagatcgtaataccgctatagtcgacacacgcaaatttagaacgtagcttcaagaaggacgttccgttgaaagtatgccaaaacacggagcttagcatacatttcaacgcagctgccaaaaacatgaaaacaatccatctagcctgtggtggaacctgggaattccgccaaacttcagactgagggaaatcgtaaattgccaagtagattatataaatggctcctaacaaatgagaccaaatatttgaagtttcattatgccagccgtaccagttaaagatagacaacaaagatttggaatgggtattgtaaaacctatagccatggattatgtatctgttttccctccatgggaatggcaactgataataatgtaaatgttgagtttcacctagactatacgctttgccatggttgtatgagtttataaaagacttgatatcggtagtaggattcaaaggttcttcaatgaggatttccgtctttaccatggattttctcattggaccgcaatagtctttcacgctggaaatataattgttttcctctttgatttttgtatcattgagacgacttgttggggaacgtaacgaggacttcgcttgagaacatacagttgaagatgaagacaccagtgaagtggatgtagaagcattgttaagcttgaaagtagcgactgaattcaccaaagtggctgcatctgaatctcccagtgaaaactgagattctgtattcagagacttgccactgtttcttttgtacacagaacttgttacttccttttcttttgttggacgaattatctccaaatcatcataccgcccactttcagagtgtttaacactttcatcaatagttgaaaatggatgaggaacgaattttgagtagttgtaattatagatggatttaccggattttttcaccttctgaaaattgtccacacccttctgctttagccttgatagagatcccatgggtgagggtatatactgagttaagcttttgcttgacgagtccatcatgtacttaatttgattgtctgttgggatgtgaactatttttcagcttatctgcgttgcagcttcttctttgtccactttacaatggctaaactttaccagacgacaaaacaagtgtagaatttgaatcaactgtgtcctaaagaaaaaataatgtccaaaaactcttattataaaacgagtaaaccaccacttcgctcgaatcgccaagctttctagatgtacacccacgctgtgtcaccttatgactatataccttatccatcaaacactttctccatttcctgcagggtaaaaaagaaaagtgaagtcaccctgcactatacgagcttcagcccataccccacactaaaacatttctttttctgcggcatttctttttttttcggtccgtccctgtcccttcccacgagaaagcgtaatgatcctcgaccctaccccacttccccacgccaattaaaacagataaaatttcttttgatttttcggatacgctaatttcgtagcaattttgaatgactagacatttgttggataactacatagtctcccacccaccaagatctgcactgccgtccgttagtcggaacactatgtgcggaatcatgttgccaaaaacaatctcattcgctagattcgcgtatctcgcccgattcaaatagacgggagtaccgaatttgtagtcttcgttggtctctccgtatttacttagataaggtgcagcataaaatgtacctcttttgccgtatgacagatatatcgcatttgtgccggtcattaagaaaactccgtaagcggaggtgatttcgcatccatttctcatatgatcagtacattccccctgtaaataaccttgcagtgctatgcttttttgaatatggcatttttggccacacaacaagcatactgcgatttcgtatttatcacatttattcgatatttcatcattatcaagggaaaatttggaaaggttcaatggtagttcgataagctggatatgctctggtgaaggatatgctcttgtgtttatgttctgcaccatgtcatatattacttgctgaattctcaaattatcattaccatcattatacctttctatattttgtgttagttcgttgtagaaaaaatccttcaaaaagtgagttaaattgggtaatttaaaataccggaaaataagctctatttcacgctgtttgacgtccatgaaattattgctgcggttattattattatcaccatcaccatcatcatcatactgaatgttgaataataagaaggttcttctacaaaaaatggacaatgactctagtaatagagagcatataaagtctttaattttctctaaacttgtaaaatcaaaccgaacgtcgtctggtttaaagagatcaacatactttttaaaagtattgaatagatatgaaaagcttgtcgatggttcctcagatccgtttgatgatattttgattttatttcgacagtctttgtaaaagtttactctcatcatatctcttgcaagcaacagtagtagttgatggaaccttcttttgaacatttcatagatacataggttaggcggttgcggggtttttcctccatcaatattatcaaaattttgactcatatacaaaagtagattcacattattaccctttattagaaactcattccaattccatattttacgagagatttcgctgctgaatgtttttgaattaacaaattttttgtaaataaacgactttagctcacaaactaaatgtaaggttaaaatgcactgactggatattctttccatattcactatttttccttcctttttgtgcgatcttaatctgagctcagtatttgaaatagtattaataaaaacactattaacaactttatatgcatcttcgatagtcgtgacttttttaccctgaagatcacctagaatcatcgctgctttaatacaaatagagctcattgggtcaaggttttcttccgcttcacttcgcttttcaatacacataaaaaactggctcgaagttctcttatctatatcatttgtttttggtagaaatgaattacttaaggaattgcatacgggacaatatatcaaccctgaaccatacgataatggaatattttttgtagtttggttttgtattccgcgaatcgacttcatatggccacttaaacatttggtatgagacccatgcccgcatgctcttaatactggttcacagctagtaaatttcaatctcgttccatcatcatcctgggggttttcttggattgcactgtcttttgtttgcttaccactgaacagcgaatttattctattaacatctgtaggattcgtaaaatcaattccatgatcacatatgttccgttcttggtatgaaaaataaacaaatacatcgtcatccttcggcatcttgcaaaatacgcaatcatcatcgcagcaactgttgattgtgttactactattctctgcatttattctagtgggagataaactaggtgatgtggttctgggtgtactaatatcggaagtatctacactattgttttccatgaatttcatttgctgttgagccaacttcttcattaattttttctttctcaatcgagcaagatgttttttcctttcaaattctttatccttgtggcttttatcttcctttgtaggccacaatattcctggtgtatatgacgtggtttgctccctcaaataactgtttacatttacgtgaggcgctgtttccattaaatacctgaaaatttccctaatcttaccatgagattccgaaaaattatccttcaacaaacagtaatacaggatagaaccaatgctgtggtaatgacagaattctgtgtccacaattgcgtattcatgccacagtatccccataaattcattcagattattaaccacgcataaatgaatcaaatgaaccactctcggcaataaattgtcataatcatattttataatgtgatctaaagtatttttcaaaaataaaccaaaagtattcactgatgatattgaatacagcccagaaaataatgtattcttcaacaaatctttaaccttttttgctggtacaaaagtatcttcatatttcattttcttcaaatttgccatattcagcctgatatttttctctacatcatacctcctactggaagacaaccctatataataaggatcaatctcatctttatacttttctttcaacacgaaaatgccattgtcagtcaagcttacaggagaagtgtaattggcgtatttttcgagatatatatcaaatgaagggtgcttggtgatatgttctggaatacagttaacaatttgtgcgtaagagcatgtatcaaagcaaagggcatgaattatttctgatttgaacgttctctcgaagccttcctttgatgatttcatgaccaatgatctcacttcagtaagcaattgaatcaataacagaatgcattcattaacaacggctacagttgtttctgtatcaggataatcatacataggtacaccatttgcccagtgcttcaaaccccaccttgagaggtaagtaaccatcagttcatcaggattgcacattgccatactaaattgcacattgaaaatgtcactaatataagtaaattctcgcatactgtattttgtatacatccgggcctggtgagtaattggagttccgtttcttacccagaaaccgacgtttatttgcccgattaggactagggttgacaaagcagattctgatatatataaagccttctgcttatcttgaaaaacttcgaagagattaatgtagtttgtcaaagaagcaggaattggctcatatctaccacattgactccattgaataacaaatttgaacaaatatgacattggattgaaaaaatactgtgtatttacacctacctggaaattaatagtctctgcgacataattgcatatcgtctctctgactgtagacaaagtcgctttgttcgaatcattttcattcgttgatgcgttatcaggtgatatagcttttctagaattggttagtgattcaaattccctggtttgagcaacatcaagtagtttaaggacgatttgcttacggaaagccgcatctttgaccaaagatatactacgtgtgtatccatctgtcattattagtattgatgagaaaaaaaaataaaatgcagaaaaatcaaagttttcaacctccacgtgttctttagtttcccttttcaatggcagcacgttactgaattcagagaaggactcaattattgcgttaaaaattgcctcatttgaaagtagttcttccggaacagtgttcgctgacattatcgtacaaaggtctttaaagcaaataattgtccttcgatttcgtattgtttcggtgggcaacttaaagccattgtataaagagatgggcaaatatgacatcaagtcttctggattgaatgccatgagagtaaaagcaaatctaatagttcgttcaatgaatcccgagcttatagtcatatttgctatgctggggtcttggaaagtgtattgccctaatatactcataagagttacctgacattctttagcatctgatgcaactgcatcatacaagaccgatagataaacatcaatatattgtgcggcaagaaactttctgctttcatcccttaacgagaataatgacgccatgatctttaacattttgaatttagatttttttgagaggatattaatagaattgatgataatatattggaatctagatccatagaaattgtagaaatggcttactgtgttcggcgaatgggctctgatcaacctttcattgtaattagtgagtatttttgaaattctttcgtcttcaatgttctctaatgaccaaggtttaaaccatgattcatcactatcttcgttagatattaagaatccacctaataagttaatcttagaaaagtcaggattggtatttgtgggagatactctcattttagaaaaatgggaataccaaacatctagcatggaaattctaagagcatatttattttgcaaagacgtggccgccttaaagcacagagaatataaccaatctgttaaatcatctgttaactttctcttgaatatatcatccgcttttcttacatgaactactatgttttccttttgaaactccttggctatttgatctatttcgaaaaaattctcactttgtagcacagtcactacatcgtgtgaatcttctaaagccttcgttattgagattgcatattcaaccggtgtattcaaaattctcgttattgtagatgctaaatccatgtagtgtacgttacactcttcttcttcgatttgaatagcccactccatatgtgcttcttttctcgtattggaccaattgttatcaaagaaaacaaaattttcatcattgaccaatggttcacattcgtgtttttccattatatcatcagtaatgctgttttgattaggatgcattagggaggatgcttttctctcgcttgaatgggcttctgcctcctctttgtatgaaacagttacatcaattaaaaaatccagaacataattcaatagggagattacgttttcatcatcggttacgttactattgtcgttagaaataggaatattatttaattcgttcttgcacttgaacgcgtcgcttgggtcattaaaggcaaaggggtcaccacaatggcatattctgccttctgggcgcattaccactttagcaacataagaatgatttacatgtttttctttatcgaaacaaagctcacatatttcatacaatggatttgtggagcacgtaaaacagtaataaattgtctcagaggggaagcataaacgcgtacacgctgttccaatatgcatattacccacagagtggtggtcattctcgaactccagggtcctccactttcttccatttagtatgtctctgtacttttcgttttcccaggcttcagaattgagtattgaaacgagagagcgccagtttatatcgttatcactatgcttaaggcgtagatttaaggttttccatagtaaataactagtggtttcgctatattcgcatttcgcgagtttggggagctcggtaagaaaatctcttatattggttatagacaggtcagaatcttccatgcgtgcttgttaagtagctattaatttagttaacgaatcttacctttactatcagagacgagtaaatgataataattagaaaaaaaagccggctcttttttttaaaaagcttgagcaactttttttttttatagagttgttagtaatatgccaagcaattgaaagtatgaatgcgttgattattgggtttctccccacagatgtacattgacgatgctctttattgatatcgcctaaaagttcaacaaacgccactggaaattgccgccgttgtcaccacaacgtgataagtgatggtgtgctttttgcacatctagtgaagaaacgggcaattaggatctaggaccagtaacacttgccccgcaaatattataacatgggccttatgattgctcggtttgttacatctaacatcctaagaagtgagtggcatgaatacgtagctatatgtagattgaaaattgatgagtcgagtcatcaccttcctctaaacgggggataaattttggcggtattttccctaattttattcttcgttatgtcagccatgtgagactaattaattcaagttttgacttacaattgcggcttcgtcggaaatcagtattacgtataaactgtgtaccataaaattggcgtactcggtattgtttatactaagccggccattctagtgatttcgcctctataaatggttgttattcgagtataatatttcaaccgcatcaaagaaagaggtagatagcttgcgttcaacaccgttcttttctttcccccttaatttagcgcttggcggttatgctatggtgacagttaacttttttaattataggatgacttgtcatattgttatatgccgcatacttatgtaaagtagttattgaggtgggggtgagcagagtaacgacaacgatggagttccgtaactaaccaatgcttaatgttggtaagtaatagcaaatatatatactacatagcttttgttatatgcatcattttatacgattcatgttcgacccttttgataaaagatgggatttttaaataagtcggtgggtgatttcgaatcatgaatagttggcagagcaggggaagtacgagcttctaaagggtaagatattgtatttcggacggaagcagcagaaacataacagtattgataaataaggcatgtggtcatcactttttggttggacatcaagtaatgccaagaataaagagtcaccaacaaaggccatagtgcggttgagggagcatatcaaccttctatccaaaaagcaatcgcatttacgtactcaaattacaaatcaagagaatgaagctagaatctttttgacgaagggcaataaagtaatggcgaagaatgcacttaaaaagaagaagacaatcgaacaacttttaagtaaggtagaaggcacaatggagtctatggaacagcagctattctctatagaaagtgcaaacttaaatctagagacaatgagggctatgcaggaaggtgctaaggcaatgaaaactattcacagtggccttgacatagataaagtggatgaaactatggacgagataagggagcaagtcgaattaggagatgaaataagcgacgctatatccaggcctttaattactggggcaaacgaggtggatgaagatgagctggacgaggaattggacatgctggctcaagaaaatgctaaccaagaaacgtccaagatcgttaataataatgttaatgcggcgcctatctcagagaacaaagtctcactacctagtgttccaagtaataaaattaaacaaagtgagaactctgtgaaggacggggaagaggaagaggatgaagaagatgaagatgaaaaagcattaagagaactacaagcagaaatggggctttgaacgtgttctatgcggtttagatgaaagaaaaaaaaaaggtgttcttactttccatgttctgtatacgctcttttatatacatgaagttcataatgctaagtcataattaatagtttttatttttttgttgtcttttttttttgcgttcataggtatagaagggaatgtgcattcattatttttatctgttattgctatattattgtacagaaaagatgagagaaggaaaaaaaataaataatcaaatatgtatctttttttcttttactttgcttttaattgactaaaacccaaataacgaaaaatacaaagattataaaaaaaacctttgcggctaaccatctattactctttatcctgtcgaagtatttcaaaagttccctttgagcaccactaatgtttaaatcgatgtcgtctacgtttgcatcaatcctttggattacttcgccctgttcttgaaccatggaggccagttgttggaagagatttcccacttcctggattgtggattctattgtctccaccgccctatttctttcttgtaagtagacgttattggataactgtccctcttccattaacattagttgagagtcgttttgagggaaagacagttctccttggttggacgagttgttattcttttctgaggattcatctagtagtgaggtcatgaatgggttggagttgttatacgtggtcaagtccgcggcgtgattgctttgcgtttggtcatcagctggtgcatgtccagtgtcggtggttagtttttgccatctgtctttgttagccatttctagtcgttgcctttcctccaatacgtctttaaaacttcctgatatgtttttcatttgcgtgtttaaaagatttacgacatttttggagtgctgtacggcactaggttgcttagaagattgatttgatgtgttgccattcacgtcggttttcttgagctgacttaattgcactaaactttgttcgatggcataaatcttccttttgatcaaaaatgatagctcggcaatctctacagggttgtcattgaacatcggtttccttttggccagcactgctaatttcgataataattgtgcggtggatgaaatttcgtgagctatgccagaagcctttttttgaaactcagagacacttttcccattgccggttgtgttgttggcaaagttttcactttctttctcttgtagacgttccctctgctgttctctaaagtttttgtttcttttcttgtaactcaacacactttgttgaaattctgaagttctatcctttatgttcatgggagttgtgtggtatggtgaaatggtcgttggaaacagaggtggaataaaatatatacagtaaagagtgggtgatttccgttcaaaggtctaacaggagcgtcgatgcggcggtaggatttttttttttttttcaatttctatattgacattattatcataatgattgtttcgaatatgccctttcgcctcgcctcgatcaataaacctacccggatattacaacaacataataatacacctgtgaaggtaaagaaagagcatttctcttttttttatttttttttttttttactttctttacattaaaaaaaatatgaagagtgtaataggtaagtataagtattatttaatcattacaatttagcttcaatagtatagaagcgcaccacttcatcaatggctttagccacgtattccacgtttccttgattcaatccagcaatagaagctctacctgaggcaaccaagtaaactgcgtgggtttcttcaagtcgtttaaccatttgaggagtcaatcctgtaaaggagaacatcccgcattgatttactatatgatcccagttgccaggagtgcccaacttgactaaatggtctcttaatgcgtgcctcattttcgtaattctggaggacatggtaaccatatccttgtgccactgttccgttaattctggcgtttccaacagtttagcgacaatcttagcgccgtaggcgggtgggttggacacttcactacgaatgattttggccaattgagatgtaacagcaggctttatagttttgttttgagcttgttttgtaagtgctagatggaaacaacctacacgctcaccgtacataccggcgttcttggcaaaggactgacagacaaagacgggagagaccgttgaaagcttctccacacctagacgcacagcataggcatccttgtccaaatctccagtggcaaacccttggtaggcggtgtcaaataaggcgatgtggttctttgaggcgatagcatcaacgatttgaacccattgttcactagtagggtccagaccagttgggttatgggcgcaagagtgcagaacgaaaatggagccctctggagctttttgaatagcatttagaaagccgtttaggtccaaagacttagtttcgttggcccagtaagggtaagtcgccgttttcaagccttgattctcaaaaatggccatgtggttggcccaagtaggcttagacaaatagaccagtttatctgggaagaattttgaaaaaaacttcgcagatatatgaagagcacccgtaccagacagtgattgtactgagattactctgtcttcctgaaaggcatcggattgcgtaccgaagatgatcttggcggcgttagatgtcaaacttggcagaccggtaataccgaggtattcatggttgtaggagctgtcgttatgaattagcttttcggcggctttaacacttggcaagacccatggtttaccgttgtcgtctctgtaggccccgatacccaagtcgaccttggtagcacgttgatcttgcccgtacctttgcttaataccaaaaagggcatcagggggcagcaattcgatgttattgaacagagtggcagacattatcgctcttgtgttcttgtattcctgtgttcttttgttcattagaatttggacggttgcgctttcccttcttaaagtatccacatacgtttatataccgacgtgcaaggcgacaaggtaaatgaggccgatcacgctgactcactcggtccgactctcggcgatcgttattcacgaagacgaaagatagccatttccagtggtgaccattagtattgacaatatgtacatcgcattaaacagtaagaaaacattaatattccgtcaggaattcctgtaaattgctcttactacaaacctgcaatgcccatatcatcatattcaaagtaaaaatttcattttccgtaattattcttatctttgggtgctttgtggcagctactggagtaattgtgtataatagatgccactagtgcagttaaatgaaatatcctacattgagagtttaaaaaattgcctccttgtatgtttcttgtaaataatgattttatgtccttctagcgtagtaaccctaaaccatcagcggctattattaacattgttaccctgacagtgcttttttatttcaagaaaaattttcctttagattctctcgcctatataaacactttgaaactctcatcgtcgtgcatttaacttctatggtaaacttcttttcccattcaagtttctctttgcttatttgtaaaaaaaaaagtaaccatagtctcgtgctagttcggtactatacagggaagggaagtcactcgcatacgtgtgtgtgcatttcttgctattgctgcttagcttctctaaaacactgggctagcgtttttcaacgctcgagaggcagagtctcaaggagcctccaatgggcctcacgtattcatctagatggcgcttcggacaacggcatcacataagagatgcagctcctgacttctcctctgatcttcgtgatcagagttttgagtcgtcagactacgagcagtttctcttagtcgttgcatcgggtgctgttgccttaacgatgtgtatatggggttcgggggctgttgccatgatatatatggatgagacagaagtggccccgttgacgagtttaacttagattaagtaggacgcatgatcttgagctcttttcctatactttgtcctatggccagctttctccttattacgaagagattgcgggatgtgggtgcagagtgggaaaatctgagttcggtcatctttgttgttcgtcctaccgcagtatattcctaaacactatgaaatgaccctagttggtccatgatcatttgggtaaaaccatactgcagacatctctataattcacatattcacatcttgtcctctcgcagaagaggaaggcctttgacgtagaaaattaagtaaatcgtatacgtttacgtatatacacttgtattcagctatatatgttgtttctgttcttctcataaaatgtaccctacttagtggtggaataaacgaattgggttctccacgtagacgatatcaaatgaatccgccgcttggaagacaactttgtccatgacagaccccgaaggagccgtgatgaactttacaccagactgcacagctctataaacgtgtctgggaagggaaagaacgcatcggatgataacgatacattgtttaatttgcttaaccattctagtctttcttctttggtgaaaggttcagggacttcttcaaatttgctttcgtaatccaccttttccgggccttctattctttgccctgtaacaaaaagatcaatcgcattcgacttgtccgctctcttaattcccttggcccacttcatgttcaaaacctttggatgttgtctcaaccaccagttgtccgtcttgtcaccagctaatctggtacagtgtatacgcgattgttggccggccccaagccccacaaccataccattctttgcgtagcaaacagaatttgattgtgtgtattttaaaaccagcgtagcaacagttagatcgataacggcttgctcggtaagtgctttgtttttggagacaatttctttgaaagtggattggtttatgatcgcatcgtttctcttttgttgtaacgttacgccaaaaacctctcgggattccatttggccaggaacatagtttggatcgatttgtaaaatacagtattttccgtttttcttcttagatagtatattcaatgcctctggttcataccctggagcaataacaccatcggaaacttctttagagatgatttttgcagtggcgacatctacaatattggacaatgcaatgaaatcaccaaaggatgacatcctatctgcaccacgggccctagcgtatgcgcatgccaatggtgataaatcctccatatcattcacaaaataaacttgtctttccacatcggataatggaagtcccacagcagcacctgctggagaaacgtgcttgaacgatgctgccgcaggcaagttcaatgatgcagataactctttcactaagggccatgagttcaaggcatccaaaagatttatatatcctggtgtaccgcagagcactttgaagggcaactcctcctgctgagtgatataagcttgtgcaggtctttggtggggattacaaccatatcttagcggtaattgggctttcccttcggagtactgtttcctgaaaaagtcagaaatggccgcatcataatcggccgtatgttcaaacgccttaagtgcaaatctatttcttaaatcctgagaaatttcaccgtccttagacaggtcttgcagaaagatagaatagtcattagggtctgaaagaatagtcactctggaatggttctttgcggctgctctcaacaaagtcacaccgccaatgtcgatctcctctacagcttcttgaactgtaacaccaattttagccacagtttctttgaacggatatagattacatacaacaaaatccaccttatcaatgtgctgctcttttaaatctttttcatcgccctctaaatttctggcaagaatacctgcatgcacagcagggtgaagagtcttgactctaccccctagcatttctggtgcatgcgtaattgaagaaacatcgtcgaccggaaaaccagcttctctgaccatgttggccgtaccaccggatgctaggatacgaacattgttctctaccaatcccttggctaagtctaataaacctgtcttatcataaactgacaagatcgcagtcttggtatatttgcccatttttagctcttttgttttttgtccctatttatggtatatttggattctttgtttggaatggggtattgattagatcttgaatgttatctaatcgctaaaaagagcaagaaaaaaacacaaatgctgaaaactggaaaaaaggacgatctatttgccaattattaaggcttattcttaaagtggaaatagccctctcttttgcttttcttgagttttatctaatggctctaataaggaaaaacgggaagaaaaggaaagaaaaaaaatacaagaaaataaggtgcgactaaaaagaacatggtgttaatttatgcggcggagaaatttacttgagcgtaaagatattatatataagtattatggtagtgccaccacctatgtaagctgctagcattggtatacgtagaacaattaggactccctcgtccgctccttgatacaggtagataagttctgcctgaggggaggattgagaagagggggtaggggtttgcttgatagcagaataaaagtacagctctaggtctataaaaaaaaaaattggttaaagaaaaaatatacaggtttgtatatagaatcattaattaaaaagataatagtataaaacacatcagataaacaaaagtttgcccaataaaattatattttccatcaaccagcttattttctgtatctccacaaggacaaagtgttttgtctcttccaggtctttcttctaccagccttggtgttgttgaatttgtgacccttgttgatacctctggatttcttaccagtggcagtcaaacctctagcttcacggtgcttgtgaactgggtcacagatccagttgtaacgagcatctcttctgatagccttgtgttgagggtcgaccaagataacttcgaagtacttgtaagtagaatcttggttaacccagtaggagttcaagactctcaagttagcggcacgacgaccaactctttcttcagcggtagctctcaaggatctttggtatttcaattcattgacaccttggttagttggcttaccgtaagtagcaccctttggaacaggtctctttctgttaccacgtctaactctgacacggtagataacgaaaccttgcttagctttgtaacccaatcttctagccttgtctggtctagttggtctagcggctctgtgaatgacattcttttgtctgtattcccagactctgactctttgcaagaatctcaaaacatcagattgcttctttctttgcaattcttccaaatatttgtaggcacccattgctgatttatttgtttgatcgtggttttcttagattgtaaaagaattacttaaggatagggaaagaaacgtgagaaatagcagttaaatgtaccggtggtaaaaatgcaatgccatcattctttgttaccaagcaaaagtgagaaatcttgaaaaattttagcacctttgaaaattttgcgtcagctccaagaaatttcagaaaatatattcgacagctttaaatccgtacatttatcaaaaaaagaatataatatcatgtttgacgatgtatgctatgtaaatcatgtcataatacgcatcaattgatactacaaatgcatctcggatagagacattgtcatgataatcgcaacacatgtcgcacctggtgcatgttctgaaccttaacactaaatatttaaacgtcatgtagggtgcgagtccatctcattcttgcccaataaattttagaaacaccctcttatgaagggcggcaaaacatattaagtaagtgtcgattgttaaacacttcccctttttttatgcatagtaaaaggtacaaagaaaatagcgtaccgtccttaaatcaatatagaaatataatgaaaaaataagtgctttgataagaatatcttgaatacaaattaagaagtgtatatttatagatattttcgtttcagcttgtgtctgtgtgtggccttatatgtaatatatgagatggaaggtgaacaaattatggagtatgttcaagagacaccgatcattccaaaaaggattatccattattcgattccaaaacaaatgatcacaaagcccgctccccatgtcgagatgacgttggtagctaatacttttcgggacatggacttgccgcagcatccggttatccatgattgttggcaaaataaagagtactcaactcaaagatattcaggaaatgtggctcaacagagattaagttttgaggaacatccaaatgaagagtgtcaaaattctgttgggttaatcaagagagtgagtactttctttaaaaagaggccattgtctcgaaagaatagcataaagtcaatcggtgacgtaaaatcggaggcacgtaaccggggagaaggcctcctgggtgaagttgataatcttaacgagcagaatgtccgagaaaacctgactagtgaacatgaaaagagtcctgaaggagattccaaaaggtatggcctgttctcctttgaagagaccccccctatacaagtgttggagcagggcaatatcaattctgagctttcttcatttaaaaacacttctttggcggaaaacaaacgctcttctgacagcttcgtttcgttaaaaccgggtgaagatgaacatagccctttagagattagtacgtgtggtaatttgactgaaagagaggatttgcaatctggcgaagaacggtttgactcagcagcccaaaatataaaggtagcttcgatgaaggaaaaaaaaaaaatcttcaaagggaacaaaacagattaatcactgagattatacgcctcgaaaacatactaaataagcataggaaggctgaagctaagaataatattaacaaacttgaaaagaagttgagtgaaacagatggttttacatctgtaaacacatcagttccagtaactcctattatgccggtcttaaatacgagaacttcttatcccaatatcgactttcatggtactaaggtttctgatgttctagatgcctttgaatttgaaaagcatgatgatcccttaagggataaatggaacactttacagtttttggaaaagagctttgaatctaaatttgaatctgcatcagagttaatccaaggaggcgagctagctgctattaaagaaagaaattttcaattagccaaactaaataatctttgctttcgggtacgagagtccatcaaaagaagacaagacctggagaaaaagttaagaactttatcgcaggacactgacaacgaattgctttttctgatgttggaaaatgagagaagaaagaaaagttcagtgataatagagtttctttctgagataatcagagagaaatccaaaagattaactgcagaagagcaaggctttgtaaatcaaaatgaagtaaaacccctcattctggacctttctgcacggataaatagattgaattctattctagaaacaaaaaatacttgtattagaagattaagtaatcaataagtagttaaattttcataaattattactttcttacatgttagttggcgcgtcgtctggctgaaaattttacgcgtcataaacccttaacttttccacacattattccttactgctaagcgcattgctcacttgaaagtaaattatctacaaagttacattatcaaaaggccttagaaacacacctaaagtcttacagtatcacaatatgagtcatattgaacaggaagaaaggaagaggttttttaacgatgaccttgacacttcagaaacatcgttaaacttcaaatctgagaataaagagtcgtttttatttgcaaatagtcataatgatgatgatgatgatgttgttgtatcagtgagtgatacaacagaaggagagggagaccgatctattgtgccagtcaggcgagaaatagaagaagaaggccagaatcagtttattacagagcttttaaggattattccagaaatgccaaaggatcttgtgatggaacttaatgaaaaattcggcagtcaggaggaagggctctctttagcattatcacattactttgatcacaatagcgggacgtctatcagcaaaataccgtcttccccgaatcaactaaatacactctcagatacctcaaattcaaccttgtccccatcttcattccatcctaaaagaagaagaatatacgggttcagaaaccaaacacgattagaagataaagttacttggaaaagatttataggtgctttgcaagtcactggtatggctaccagacccaccgtcaggcccttgaagtacggctctcagatgaagctaaagagatcaagtgaagagatttctgctactaaagtatatgactcacgtggtagaaagaaagcgtccatggctagtttggtaagaatttttgatatccaatatgatagagaaattggcagagtttcggaagacattgctcaaatactataccctcttttaagttcacacgaaataagttttgaagttacattgattttttgtgataataaacggttgagtataggtgatagctttattctacaattggattgctttttaacatctctcatttttgaggaacgtaatgatggagaatccttgatgaaaagaagacgtacagagggaggaaataaaagagagaaagacaatggaaattttggaagaacattgactgaaactgatgaagagctagaaagccgctcgaaaagactggctctactaaagttatttgataaattgaggctaaagcctattttggacgagcagaaggcattagaaaagcataaaatagagcttaatagtgaccccgaaatcattgatttagataacgacgagatttgctctaatcaagtgactgaagtccataacaatctccgagatactcagcacgaagaagaaacaatgaacttgaatcaattgaaaacattttataaggccgcacaatcatcagaatctttaaaaagtttgcctgaaacagaaccttctcgcgatgtcttcaagctagaactaagaaattatcaaaagcaaggtcttacttggatgctaaggagggagcaagagtttgccaaagcagcctctgatggtgaggcttcagaaacgggtgctaatatgataaacccattatggaagcagttcaaatggccaaatgatatgtcgtgggcagctcaaaatttgcagcaggaccatgtaaacgttgaagatggcatattcttttatgcgaacttacattctggtgaattttcgctagcaaaacctatattaaaaactatgataaagggtggcatattatcagatgaaatggggttgggtaaaacagtggcagcgtattctttagttttatcttgtcctcacgatagtgatgttgttgacaagaaactgtttgatattgagaacacagcagtctcagataatcttccaagcacttggcaagataataagaaaccatatgcttcaaaaacaacgctaatcgtggtcccaatgtctttgttaacgcagtggagtaacgagtttacaaaagctaataattcccccgatatgtatcatgaggtgtattatggtgggaatgtttccagtttgaaaaccctattaaccaagacaaaaacccctccaactgtagtccttactacatatggtattgttcaaaatgaatggactaaacattccaagggaaggatgacagatgaggacgtcaatatatcttcaggcttattttctgtcaatttttatcgcataataatcgacgagggtcataacattagaaacagaacgacagttacatctaaagcagtcatggctttacaaggcaaatgtaaatgggttttaacaggaacaccaattattaacaggcttgacgatttatacagtctggttaagtttttagagttagatccctggcggcaaattaattactggaagacctttgtatcaacgccttttgagagtaaaaattacaaacaagcatttgatgtggtgaatgcaattctggaacccgtattgttaagaaggacaaaacaaatgaaagataaagatggtaagccattagtagagttgccaccaaaggaggtcgttattaaaagacttcccttcagtaaatctcaagatcttctatacaagtttctgttggataaggctgaagtttctgttaaatcgggtattgcacgcggtgatttattgaaaaagtactccactatccttgtccatattttaagattgaggcaagtctgttgccatcccggtcttattgggagtcaagatgagaacgatgaggatttatctaaaaataataaattggttacggaacaaacggtggagcttgactctttaatgcgtgttgtttccgagagattcgataactcattttctaaggaggaattagatgcaatgatacaaagattaaaagttaaatatccagacaataaatcgtttcagtccttagagtgctccatctgcacaacggaacctatggatttggacaaggctttatttacagaatgcggccacagtttttgtgagaaatgtttatttgaatatattgagtttcagaacagtaagaatttgggtttaaagtgccccaattgccgtaaccaaatagacgcttgtcggttgttggcattggtacaaacgaatagcaactcgaaaaatttggaattcaaaccatattcaccagcctccaaatcaagcaaaatcactgctttattgaaggagcttcaattgctacaggatagttcggcaggcgaacaagttgtcattttttcccaattttctacatacttggatatcctggagaaagagctaactcatactttctcaaaagatgttgcaaaaatttataaattcgatggacgtctctcattaaaagaaagaactagtgtattagcagattttgccgttaaagactatagcaggcaaaaaatcctattactctcgctgaaggctggtggcgtgggtttgaatctaacgtgtgcttcccacgcttatatgatggacccatggtggtcgcccagtatggaagatcaggcaatcgatagactgcatagaattggccagacaaacagcgtcaaagttatgagatttatcatacaagatagcatagaagaaaaaatgctacgcattcaagaaaagaagagaaccatcggtgaggccatggacacagacgaagacgagagaagaaaaaggagaattgaagaaatccagatgctgtttgaatagtcataccacatactcatatataaagactttatttattattattttcaacccgaaagaactaattattcttcagctacttcatgcaacttctattatcttccttttccgttacccgtatttttaagttgcaattattaaaaaaacaattaagaaaataaaacagcgccataaggcatggacgatagaaatacgaagacgaagaaaatcatcatcagtcgggatcaaataagagataattttgaaaatcgaaagttttcattatgacagaaagtgtaggtggaaataaactagtagattttttggtaaatgttcaatccattttgaatgctgcctctgtgaaatgtcatgtagtagatgaaagttttccagccaagttctttgagaaaaatccggataagatatatgaatcatattgtaaattcattaaaaatagaagtaactctgaaggtttgatacgtaatgaagataaattagttttgacaactatcaataagaggtttgaaaatggagagtacgaacccatacaaggtgggttttataagctgtatcacgacattaagctggtttgtacaatcctcattcacttttatcctcagggtacaagaaactaccaattagtcgacaagttctacaaattttcttcagagcttttattacgagaatgttgtaggataggaattgctctaacgcaaactaataatattaaatcaagaagtggtaagttgttgagcggaaacgagatggatgaatacgacgatgacgatgcaacagaactagacaaaataatctcttatgattttattaagatttctatgaattacacagtgccgatttctcaaacatatcagataagaacgaaggatatggaccttttttcttcgataatttctaaatctaatcttgacaaaagacctcatgaacttcctaatacaaacttcaaaataaacaacgtcttacctcaaactgatatagaaaacgaagctccaagattaggatttgtaggcgctaatactagtaatattccggaccctacgttaccaccaactgaaatgatgactagatttttgcatccaaattggtatgctttacctacaaccgtctggctaaaatatggtaattataattcttgggcaccttcctttaatgaaaacggcaccgttgtggattcgacaacaaggggtcttatttggcttgaaagaattggttatatggacttgtatgaaaaaaatgaaaagaaagtaaaacaagaagaattactgaacacgaatgaagaaggcataaacaggaagcagaacgatgaaaacaacaaaaatgttgacggcaaaagcaatggcgttcaggacgatggtggtgataatgataatgatgcgactatcgcttctgcaaattcagagagtactgagaataaggaacaattcataatcaagcttcaaaacttatataattggacaccatctaattacattggagatgacgaaattgagaactttcgaaatggcacaccagataagttggtttcagactctctcttaaaacttaaaagacttagaaaggagaggattttaaataaagttttgaagcctactacggaggaacgagaattatacttcaaagtgaaaagaatactaaaggaggttatcttagcaaagaaggtttccaaggttcctataaacaatgtaagggcctttccagtattacaaacaaactataatggtagcatacctgtggtaagggcgcaaccaggtcgtaaacggaaacacaagaaataaatagtgtcagcggtagtggaatcaaagataaataatgaattatctttgttttagtttcatgaaagctcatcaagtcttttttgactaatgtatgtttatattttgatattagataaagtatgcatttgttctgaaggctatgcatacgtaagtatatacttgggttgtattatgcagaataaagaaatgagagaaaacaagaatcgagagaaaacgacacacttgacaataaataggttccattaaaaatggatgtcggcacctaagagataggaaatcaccaaatagcaattcaagctcccgattaaagcccatacgaaaacagaggtataggtcaacaaacgactgttagtaaaatcaactattttactgtgcttggagttcaatggagtggtttcatcagcaatggcgttaacatcggcaggtgctcttaccacaccattttcgtcatgaacaaccatcaactttctatttgcggtaaaataaattaaaggagcggaaacgattggtaaaattaaggacaagaccacttgagaaaaattcaaaatatctgaaattcccttttcccccatggttaaagtaacaaataaacatggtacaatggcaatcaatctggtgcacaatcttgtggcccaaggtggtaaagaccactgtaaaaatccctcagaaacgatttgcccggcaagtgtacagatgataccggcagattgaccagaacataacatggccaatgcaaagattaaccctgccgcaggagatatgtagtggaccagtaatttgtaaatagataacaaatcagcatcctctgcctcaggttggcctgataaagtagcacctgcaacaattaaaatagcggaattaacaaaggtggcaattaagaacaaagaaatgattagttcagcgtacgcatagtttaacgtatattttatagcgcttaaacttgggcgggcattaaccttaccgtatttcttcaaatcgtaatcgtgcaatcttggtttaacaatggatgagcccaagtataatgaatgaggcatcacagtggcacctaagatacccaatgaaatgtaaagagcttgttgttccttaaaaatgatatttgaaggcaaaaaccctttaaacaattcagctttgtctgggattgaaactttaaacagctccaaaacaaagcaaatgcaagttccaatgaccaaaatcccaacgccaaattcgaaaaccctaactttttttaaggactggccgtttggtgtgtagaacattaaaattaccaaaacatctagcaccgttaataagacaccccaagttagtggtattttgaaaagaatttgtaaagcgatggcagtgcctacaacctcggccagatcagtagcaatgattgccacttcagcgaaaaggtaaagggtatagtttagctttttaggcaaattatgacgacagttttcagccaaatcatagccagtgatagtacccagcttcacacagagacattgcaaaagtacggcaaaaatgttggatataaaaatagagaataataaggtatatttgtattgagcaccaccggaaacactagtggcataatttcctgggtccatataagccacactgactaatatccctggcccaataaatttggcaaatttttgaagaatctgcatataagatcgcattttttttctcttgtgatgctactactgttatcaattagcttggaagaacgatatatttaaaggagttcagaaggaaataatagtttgggtatgacaactgaaaaaaaaaatgaactaatatataaaggaaccccgtatatttatgtggagtgatctttgtcttctagctcctttgaaataaatattcaattatgcaacctcacagaatcagatgaatgagatatatacagtataaatacctttagtcgcatgacaacaggatgtcgtaacaatgcaatattagagcatttttaagttgacccaaaacggaaatttcaaggtgcggaaactggaagagaggcagggcgggcaacagggtgcggttaccatgagttacaaacaatggtctattatgaagtaatctattgtgctgagtggtgatagtgcacccgatcatcaggggctgtctggcgtgaagaggcaccattcatttgtcgtggcttcaatgtgtcccggtttcttcacatgcgctcgcaaggcttgcaaaagactggaagaagggcttgtggcatcgtccctcgatcgtaaccacagagtttctttggcaaagttatcgctgtcatgcttaacaattttttcattcttcagggtatagacgtagttgttggtatactcggaaaaatgcatgagtttcggccttgttttgtgcatgcaggatgctttctttatataattatcagttactttttttttcgaatttcgtggaatggtcatgtccacggtattgtttcttttaccgtaggtttgctgaagctttattagttcctttttttctgtatttgaaagctgtctttcgttgggcattccccttttattggcatctccacagctagtacgtttggcctcaagtaagttttcgctcagtttcttgttgacgtttcttatttttgtgatcataaaaggattagaaatagaagcgtccttagaaagttctaaatcctcgttctctggaatagtttctatatagttataagttaatgacgagggtaatgttgaggatccagctcctgctacttcactattttcgcttagttcttgttggaaattatgtcgccaattagtactgtcctcggaagccatagacccggaactcgagcttctataacttgaaatggtcagctgagtttgttcgtcaagagctttatcctcgctaaattttgtaggtgaaggagtagcagcgacaatggtcgtattctctaagtttgcttcatcgtaaaaagttggtactatcaaatctgagtttttttgtgggatgtcagtcttgtctttaccactaacagcaccacagccctttgatatttcattctctgcgtcgggtgtaggtatcaccagtgcgggagaagttttttcgttgatagaaggctgaacatgtttatctcccagcatatttgtttcgatgccaattctctcctccaataacaactttaacttattctctatcttcttaaatatcacttcaaaacttttgatcatcacgtcatttttctctggttcgatatttacgtcaagaagctttgtatcgcaatttaaattaataaaccaaaccataggatctagtaaagagaaatctctatagattgacgatagtaacttagaaatagtcttccccgtctccaagttcaaagatagcgctctctcattaacagataaaaatttaaatcgtctctttatattaataacgtcagattctggcaccatcctcggtaagatcaaatctaaatttattttttcgtcgataacaaagttttcttctacaataaagttcagcggcacaggcttttttagtctagctagtagggacaaacttctagctctagaaatcttagggtctaacgtttcttgcatttgtttacgctctatggcaccatttttttgtaatgacaccaacgaaaaataaaaccgaatatttctatgaattagagaataatggtttattaaatagattagttcatcgaatgtttttcttggcctcgaagaaatttcgagataccttgctcgtaaccctcccagaagtttccttaatattactgtagtccccacgggacaagataccttgtacctttttccattggtaataccacccttactatcaactaaccatttttctccaatgacatcatctgcagtttttgtttcaacctgcattgagcctttctggttacacaagtttgacaaaagaaacaatgcttcacctctgaatccaagagtagtcagaatcgaaatatctccgagactactcatctttgatgtggtgtattccaagcacatagaaggtctgtcgataatatccacacctgatccatcgtccttgactgatatatattcacatcctcccgtagtggaatctacatcgatgaatacttttttagcacccgaatcgatgctattatctaataattcccttacagcagctaccggaccgtaaataaaggaactagaaacaatcttccattgggattctggagataactgatgtatagtcatccaaaactatgaaaaggcgtctgttcctcaaaccgagatgatgggatgtgaaataactttatatgtttataaaagtgattactttttcttgtatgggcgccaaaaaagggccatgtatatgagggatatggacgacagtgagattatttaaatagcaaagactacagtaaaagcaaaaaagcattgtgccagggcaatatagcgagcactacttaaacccaaattaggtgacaagtgaaaggtttgttatgcgcaaaacttatagataatgcagaaggtaatcttttctgctgtactatatgttcacattgcagtgttacgaataaatataaggatatatagctctgcttaaggggttttcttggaatcgagtcgagttattctagaaattgttaaaaataaaggagaataaaagtaaaaaataaatggacgcaaccggaatcgaaccgatgacctcttccttgcaagggaagcgcgctaccaactgcgccatgtgccctaaaacgcgtacaaaggagaggaaattatttgactacttagtactgttttcataggtaaaccctccactgtggctaagatgagtgttattcttcaacctcatagaaagcacgcatgttactttctgagatatatgtgggtaattagataattgttgggattccattgttgataaaggctataatattaggtatacagaatatactagaagttctcctcgaggatataggaatcctcaaaatggaatctatatttctacatactaatattacgattattcctcattccgttttatatgtttatattcattgatcctattacattatcaatccttgcgtttcagcttcctctaacatcgatgacagcttctcataacttatgtcatcatcttaacaccgtatatgataatatattgataatataactattagttgatagacgatagtggatttttattccaacataccacccataatgtaatagatctaatgaatccatttgtttgttaatagtttgaatgtttttatcggaagaggtttggtcattacgtctgcaatattctttttggtttcgatatagcatacgtgcagatgatttcctgatacttcatctcttagtctcattgctttagtaccaaaaaatctgtttctaaatttctcttcattattggatataattatactgattgtagatttactgtcggttagtaatcctttagtaattggtttcttgttaagttcttgcacaaggtgactgaggttatttaataatgggacagattcacttatcgcgtgtatttctgcttccgtagttgaagtacatgttaatgaagccttggtggactttcctccaattacttttccattaagtaaatatatgttgccaatttgtgatttataatacggttggttaccatacgatgcatcgcttataacaactaatttatttgttggcttaacaggtttgcttttgtgccatattaattgcttatctctcgtattccatatgaactgtatcaattcatatgtcatatctaacacttgcttggacggaaatagtatatgttgtgcaagtgtgttgatgtagtataataggtcaaatctaaatttatatccaacatatgatgctagacctatcagcttttgcatttcatgtaccttcattttgtaatcatcttcttctagctctagttcttgctggtctatatatagacctggttgacctggagcgctaagtttccttccttttgggttcaaaggtacgtttagtttgggtattttttcagttaatgagttttccatacctaatttcatgtatttacctctttgatatttgatttctaagccaagtatgtcgtactgaatttcgttatcactttcacccagatttattatctttgtatcgtattgtttcttgagtgttgttatgattttcttatttgcatttaagtctttgctgaacaatatcatatcatcaacgaataagcaaattgttacttgactattcttaaatacgcatgaccatccacgaacttcttccataccacactgttttatcaggtatgatttgatagtttcgtaccagttcgctccactttgtttcaatccataaagtgatttcttcaaacgtattaacttatcattcattcctaaatgtggtggaggtcttatgtatagttcttctttgatgtctgcatacaaatatgccgaagatatgtctaattgtgtaatatagtagttattgtctgatgcaagtgacagggatgtcattaatgcatagtgatgtacggtattggattgcatgcctgggtcgtaagtgtcaggatgttgaatatcacctcttgcaacaaatctagctttatgagtaccgccacgtttcctgttaaagataaacattgaatttattactcttttggggtctatttcttttctgtcataatatctgtcagtgtcccaagttttcatcttcaacagttgattgacttctttgtggtatgcctggatatatttttctttttctttaatatctttattataggtgattgcctcatcgtatcgtaaggtagttcgtattggtttgattgattttactgcttttacagctgcaatcaggtgaattcgtttcttcgatctcggaggttctaaactacgcatattcttagtattccatgtgtctcgtgataccttaatttcagtttcattatcttctaatgatcttttcttactgttgatagtagtataggcattagagtcaccaataccacccaaactggaattagtttgatgagaatttatcggtgggagttctttaaaggagtctgataattcggtaggaggttctggaggcagatcggggagtggaagatcagcgataatagattcctctgtattctccttaggacaggtatctgacgttttgataggaacgacgtggtgtagtgaattactttctgatgaggaagtatcgatcgaaggtgaacggtgtatgatccttttctcagtctcctgttcgcttgtctgcggaacagttttattattggtaccacccgtactggatattggtacgtttgtatgattagtctcattgtcactgtacgagtctgagtgtctgaaatctttagatttactggcgtgcgacgactcatgtgtgttagattgggacatgggagcaagtaaaggaacatctaatctatgcataccacccgaaccggtactctcgatatcggaaatttggggggtgctagatctcttcttagatggaagaatattagattcagatatgttggggtcaacttctctgggtgcgcgaatattggttttggaaacacgtttcgaatcttcagtatgagttgacggaggtgtggaatcggttggactcacagcttttgaaaggacatttctcggttgctcaggatgtagttcgatgtcagattggaagtcatggtcagattctatgttaagatcatcggattgttggatctcatttgacgcaatgaacgattgatatgaagcagttaaacggtttaagtcttcatcgaaagtgagtgcgtcgtaattgaattgatctaatctggattccttgccctgaagaataacatagttagttgtatctactgtcttctttaaggatggaagatagatgatatatccataagagtttcgagacggatgtagagcgtagcctgggatgccacgaggatgtattttggagttagggttgtgatcattgacgataacaggttgaccgaaaggtaacaaagtactgatatcaagtcctgccaagccagcatgttgtcttgcagattttttgcttttaggtgaagctagtgaatttctcacaatagtagaaaattcgattgcagagaaccataaatggttcggtaaaccactacattgcagttgagtacggcagtcatctaataaggtacggttgagccgttcagcgactccatgtgctcgggaatccgctgtggttgtatagcatggagttataccatttttttcaaggaatttatggagagttctgttagtatactcagaaccacggtccatttgtataaccaagacactggcctgaaactggtttttaataaaagctagtatcgtagtaaaaacatcgaggatagagtcctcgcgacggtcgtgtaatggataaacccaacggaattttgttgtctcatcagtaaatgagatgaaataggatggtgcactttttggtaggttgtgaactggaccaaatatgtcagtatgtaggtattgaaagggttcgtatgaattttggtattttagtcgtgaacctttgatatgtctgtgtttggtgcttttgccgattaaacaatcaggacattgatagtcaatagcactagaccagtcgacatctgattcgttaaaatacgtgatggtgttatttttaagtgagtatcgaattgtctgtgcattggcatgcgcaagcattcgatgaatgaaaggataaggatatttgcgtgtactttcacttgtatggacattattgatggtgggtacggagatatttgatggaagcaagtactttttagatacccagtaaaagtctccatattttacgataggtgcaagtacagtgccgtcagaccgttctaagacgtttttggtaaagcatgctgtgatatctactgcagccaattcattcaaactgagtaagtcataggctatgttaggagtgtgcaatacctttattgatgttttggtgttgtcctggaagtgaaattgtaggtcaccaatagcgttaattggtatatttcttttttgagcatcaactacgtttatgtcaggattagatgatgctgagtgtatgtgatgagcagatcttataagggttcgtgatgctcctgaatcgagaaggaggtgtccagggagttcatcatcagaatgattagtatgatttactgtagattcagtaagtttctggcctaagatgaaggtcgtgcttattgttcaattgaatcggttcagtagttgatttactgatggaatcgttgtccgtgctgggagagttattagatgtggatacattgtgagccctggctgttttcgatttcgaattatttgttttttgaggattccgagctataactttgggtttggttgtattcgtatagctgcgagaatcattcttctcatcactcggatttctcctgtaattaggtttgctgtttctcgatccctgttgttcttcataaatagcatggatatctaagaacagttcagcgactgtcatatttagatgtcgatgacgtgtgtagcgtaaaaatttatattcgccagatagacctctcataattaattggcatgcgaccttgttattgatatgaatgccattattgttcagtctgtcgataatgtttgtgacttttgtttcaaatgcatctgcaggtgtactgccattatattgcaaatttgccagggtcacaatgtcgtttgcctcttgggtatcagattgcattttttcaatacttttggaaagaattttcatgatatccgtataatcaacggataggatgtctttgacccaggtaggtaggaattgagagggagcaaatatttgaaaagtgttatacaagaaggtgagttcatcatcagtgatctgacgtacgggttttccgtttactgtcggaataataccaccgagattcgagttttgtaaaaatttgatgtatgttttaacccaatttggaaaatcattaggtgaggttaacattggtggtggtctgacatattttttagtggatgtcatatcagagtccgctgaggatgaatcagtaaatgtattacctgactcaggtgatggagtgctcagaggcgttccaactgatgatggatactgcggaaactgtgattgtggcccaggtggaaagtacataggcgacatttgataaggtgtatacggaatcatagatgggtgtccgtaaaatgaccaaccagatggattggcttggttttgggtcatcatgcactgctgtgggtacggcccattctgtggaggtggtactgaagcaggttgaggagaggcatgatgggggttctctggaacagctgatgaagcaggtgttgttgtctgttgagagttagccttagtggaagccttatcatattcttgaattttggaagctgaaacgtctaacggatcttgatttgtgtggacttccttagaagtaaccgaagcacaggcgctaccatgagatatatgtgggtaattagataattgttgggattccattgttgatagaggctataatattaggtatacagaatatactagaagttctcctcgaggatataggaatcctcaaaatggaatctatatttctacatactaatattacgattattcctcattccgttttatatgtttatattcattgatcctattacattatcaatccttgcgtttcagcttcctctaacatcgatgacagcttctcataacttatgtcatcatcttaacaccgtatatgataatatattgataatataactattagttgatagacgatagtggatttttattccaacactttcatacgtaacgggggtaatattactagctgttagaataagagtcaacgatcataattgactagtaacgcaaatactactaaacagatgatgttttagagtttcattctaacaaattgataatgtagtagaataatgaatgacaaagtataaaagaaaggaagacaaagtgattttattatcagaactatcaactccctttcgtgaattccaagactgttgaggagaacttctagtatattttgtatacctaatatcaacaacgaaatcccaacaattaatacgaagttcacccattttctgataattgttacgtgcaaataatagaactacttttgtcgaggtgtaatctcgtattcaaactatatagtaaattattctcaatggtcgagtaatgcaagaagatgatattgaatactttgcgtaactttaccaattatccaatatgcaacagtaaaatgataccttcacatttcaagctaattccaaaataatacatattaggtaaaatcctcaatttaattgcccggttttaccttcagacatcgctccctttccattgacacatctatacccttcaatgaacccgctatgtaatatcaacgcatcgtaaaaatagaataataatgcagtagtacatatccagcctagctgcaatctaaatagctgtgatagtcggtgtaaattaatagtttggtcagttttaaaaaaaaacctaattttggtacaaaagtagaagctgaaagcagtcattgataccaataacaaatactttagctgaaaccatttaggatacttttttctggcagcacagctgggacatactaccttcgaacatctctttggctttgttttattttcatttttaaaatgaccgttctttcgatataaaaagaaaactataataacgagggaaattgttaccgcccccagaatcatatctatgatcttaatgatgattgcttttgggtacttttcaatcaaattatctactgatggcaccataaaacaatttataaaataaaggctacaaacggcctttgttaatttttctataattaataaggaattagactttgggatctcatcttggctttctgtcgcactaagttctgcctctttcattatttcctatactttgaaggagaaagtaaactttaacggcaagttcctgtcttaactaccttttagttctcgtgtgttgtgaagggcctttgaggaaaaactcgaaagtttgttccgtacttttaaactttcaattttttaccaaaaaggctatttaccgctttatgggaagatcatggcaagtcaaatccacgttaaatggaacaagattaacttgccacagatcaaatgctgaattgaagagaagttttaagcattaagattcttaatatgatcattaatatatcagtacgtgtctcaactggaatcgtataaggttcttgtaagtacaaattgtatgcagaaatttaaatgcgagaacaaaacttgaatctccccccgcatttaaaaaatatctttttgaacacagtgcaactgattaaaagtacctgtaatacatatatatgtttgtatacgtatgtatatctaattatttcttaccgtcaaatcataattatttttatccgttcgtaaagcaatccagtgctaaataccaattgtgaggccatcggcttagtttggaacagcagtgtagataccgtccttggatagagcgctggagatagctggtctcaatctggtggagtaccatgggacaccagtgatgactctagtgacttgatcagcgggaataccagtcaacatagtggtgaaatcaccgtagttgaaaacagcttcagcaatttcaactgggtaagtttcagttggatgagcagcttggaacatatagtattcagccaaatgagctctgatatctgagacgtagacacctaattcgaccaggttaactctttcgtcagagggagataaagtagtggtggctggggcagcagcgacaccagcagcaatagcagcgacaccagcaacaattgaagttagtttgaccatttttttcgattgaacttttgtagatctttttagtgaagatgtgagctcactcgaatgtaaataacaatgccaaattgtcggaaagagttaatcaaagctgctctatttatatgccgttttttaataagcgacggacgaacagataaattgttgaatagctatttcactgctgatatttctcttacttgggctcccctatcccatactcttcaccactacaaatatgcagttgccctttcttcaacaatgctttttttatagatctcgtatacggatccgcgcctttgtactacctatatcttattatgatatatacaggagcacaggaatgttcggtacagggatgatacctttaaaggaagttttggcatgccttgacaacttcaattaatctttggccaagaaaatgaaccagaaatcaaattttattctgtgccctctgaacgagggcaatatccaatgtttgacactaaacggttgtcaggagaaaaattgaatgtttcccaaatcagaaacattaaaatccctctatatgatcagaggagtcgtacctgttagggtatgagcgaggaaacgtgattgagagttataaactgaccatacgaagagttacggccattgattgggttcatgacacccagggaagtttcttttggattaaaatcacaagtcttgcaattgctgtatgtattgcatgagtgaagtagttggcatctaatggatacccacttagggagtttatggatgaatcttgtcttcatagggtagctcgagagtgttttttaatctagtgatatccacttagctaagcgcggctggagatacaatatttacaaaggcaatttcaaaagtaggagcgttttcaaaggcctgctccattctccgttgaggtagtagaagcaaatataaacggttaatcttgctgttttccttgttttgtctgttggttttcacttgctgaagcctgtggttcaacagtactcggagaatcggccttatctagtctccttctgacctgtaatgcgtaaaattacgacaaacgtatttcgtgaaacaattgataggaaaattgtcatttgcttgttaaggcagtgcattgaggctctttaaaggtactttagaagtttatgttactatccttctagcctgatagaacaataagtaaagaattgacattcagaaatcagccatcatttcgtttagtagtagcaatcgcaagtagtgactgtaagagatagaaatgtgtacttcagtctggaactggggcgcttgtgaaggatgtgtgccgatctcaggctgttgatgaaggtctcttcaaatactatattattatcttttagtaggtcccaggaagtgccttattctcaacatgttcagcgtttatctttctcagcctgaatgtatttcaaacgatgactagaagagattagtaccccttatataatcctcgaaaatgttgctatctcagtgaattgaaagttcatgctgacgtctttatcagcgttatccattgccttgttcttttcagtgcagtggcagatgttacgagggtcaaataatttttgaatatatatagaaatggctacttactataattaaaaataaatatgaaaaataaaacttcagtaccccacatcattctcatttttttctgtttgtttgatttttaggaatttggctccatcatgaacattcgttagcgtatgatatcactttttcattatctcctattgttactttacttttcatatagatatccttcatcccgtgtaggtctactacgcaaaaatgaattctagtaattaataataatgatataaaaaaggctaagtgcacattactaaaaacgaaactaagatccttagtctgagttgatatcacctgcgaaaatacctttttctctttgatcatcccatttttcgatccagtctaggggacataaggcgttataggtcttccaaaagaccttgcacggagcaaaatcttcgcccttcatattaacacacttgtgataatccacataagattgccaacaatgctttgtttggttttgttggggaaatctagcatcgaaaccaactgtatgtagtggagagttttcttgatcagccatgtctattatactgtatttatgtgcttgttcctatttgtgaaagcaaagatactttatgtattcttactaaaatatttgtatatctctgctaatcattttaatgcaacttttctatctggtgcatctttcatcaccttttaaagatcctgaagggatggggatatcgggcaaaactacgcgcgacgcatttctgaaaattgattggtcaatgttatgaagctatatggtaaagaatacatggtgtcatatagatttatttgaatctctcgagtgctttttgaaccaattgtgtgttgttttctctgtctaattccttgagtaagcgtattaattggaaacacatgtcccacgaatcggtagctttaattgggtctgtggcgtttgcagcacttgtcaccaaaagctctaagactttaagcattaattcttcatccttcaataaattagtgacagatttctctgacttttttgtagagttatcatttagagctttgctttcctcagtccctaaatctgatttcttaaaatgtagatcatctcccaaatctttctcatcgtaatttaaaaacactaacagaagtacgccaagcattttagcctcattttcttcgatacagagtgctaataaatctcttggtgtcatctttagattagtgaatagatggttccagtatttagtttcgatcttccttaaacaattactaataatttctaacataccactgtgggttggtggtgaaatattatgctcaggatcggtgttgtcatacatcttaattaatttcaggatatcatccaaagagtcgcttcgcagtattttagtagacaaaatcttttcgagtgcaaatttgtaaggctttaaaaaacgataattgtgtgaaatatcctccaaatctgtgttgtcttctaatttggctaagattaattggtcgaggtatatttggtgtttcaccaccaatttggaaaatcgcgcgttaaaaatgcagtgaagtgtatgtgttgtagctgtttctggggtggttgatattggatacaaatcttcttcgattggaatggaaactagtggctttttatcatcccataaatcttccaaagagtatacgacgtaattatggccttgaactacaaatatttcgtccctgataacatcgattattttttctatgttatccaacaaagttaaggtttgccagccccctccatccactttgccaagctttataaatttcctatcggcaaaaaataacaagccctccttcatgttaattatccactcaattttgttgggtaaaacatcaattggaatgttaattttgagatactggtagaattttttgatgatgtttaatccacatggatgtacagtagaaattacatcgaagacaattgtctgtgtatcagtaactaaaataatctcggcagttttaagcaatgcatcaggttgtttttcagaagcattgtgattcttggatttcattttcaacaacttataccgggataaagtattaacatgtaaactgaaaacaatcgtattctctggaacattgtattcccacatgacataatctgatagttccacgtccggattcgcttcttgcagtggaatctgcagacatttcagatttgttgagccatcatcattcttcatatgacaaaccaaataattatcacctagccaatgtaaatccaacacgttttggtcagcaaaactagaccacatattggtctctagattgtggataagcagtatgtttttgttcgacacataagtagcaaataacctcaaggaagaattaatttttacaaaagcaatatgattattgaaagtctttgtaggaagttttatgacttgtaaattatcattattgattgaagaacttgtcacaggtgaatatatgattacatcattgttcgtattggttaatacgtaacattttgggtttctgaaatcaaattgtgtttgttttatttcttcccataatttccaaacttgatattttccggaatgagacactgttattagtgatttatccaagcatacaaaatcagaaattttatattcagccgcctttttctcatttttatccttgctgttgtcattattgttatcaccattataatcatcttcgtcaaaatatgtagcgaatagcagattcccaaattctgtgtaaaaatgaatgttaacactatcctcagaaaccaaaagtaatattttatcattaattttatcgcaaagttttatcacaaatggtggtttccaagaatggcttacttttttaattcttgtatcaaagcagattattttttctttgtaaacgaccaccaggtatccattaacttctaggcaagtcaaaagttcatctggtgtgtccgttaacggtattgcttcaacagcttgcttttcaatgtctataatgcttacaatagtctgcttttcgacggaatcatgagataaaaccattaattgtttattacacacaattgtcttggatcccttcttcacttcaaccaacgagctcttgctaactttaaaatccgatattgtaagtatttgtaatccatgagggaataaaactatcaaaacttcttcataacgcccatccccgactttggaaaatgtcttgatgccaatcatgtctatgatttcatagtcaaatttaagaactacttttaaacgaagttctagttttttcacggggagttcatcaatgttttcttgattagaaagaaagtgtaaaaaccctttttccttagttatgccaaatccattctgtataattcttgaagaactatttttatcaaataccgtgagagtatcatcatcgttgttatagtcatattcagcactgttcgcttcttcttcactcattaaaagaggctctatgacgggtatgccgtattctttgaaaattatttcatttgtgcagttttttaaaatttggtatgttaaaaggaagtttttatcagtcattacgtaaaatatcagctttccctggtgccacaataagtattgcgagtccttttttgaaataagcccttcgatgatatcattatatggagctgatcgtttcattgatctgttatcgccaaattccttaagagaagccattgttcgttcatggctagctactagtgccattggtttgaagttgtaaatgagcactcttgttggggttagcatgataagaacattggcctggggtagtgtcattgattgaagaatattgcaatcatctattttagtaccctcacctaattcggcgttgcggggtggaattctaagcaattggggcggactgactggccataagtgcattttccacgtgttcagtttcttacagcttccggtcaataacactcttaccttacctttttttttgtagaggcatttaggtgtatttttttcagactgtttgatgaacatcaaaggcgtcggtattgccgaattaacatcaaagaacaaaagcctgccataaaacgacagaaaagacaagattttggccaagatggcaacgccattcagaagttataataatatgttaaaaataaatcgtttgatactgtacaaagttgatgttcatcgttgtcactaaaaacgctcttaaaatcgaattgtccattgaaaaagtacatacttatatacatatttgtataaataatacacatattataaaaaaagcgaaaagggatggcggacctcccatggaattaaattgtcaaatttggttgaggcacttaaagggcaactgcaaagattccgaacaacgccatggggaaatataagcttttggcatgggcaccattctgtgattgactagttctggatgttgaagaagagtttgatgcggatataagtgctgttgtactgttttcttcattagccatggaaatcatggactggcctgcgttcgctgtcgagaaaggaacagaattggaaacggagtttttttggctggcataagatgagttagtcatggtagcttctgtctcacctgttatgaagtgttggggaaggtatatggtggtggcggaggctttgtttagcaaagaggtataccatggaaaggccgtaatgaatgtttggaattgagtgaacggaaaactctgagcaatatcagattgtaaatctgctgttgaggccaaatcaaccatgtgatagtagtagtcagcaacaggttgaggtagggttaaatggttttgcatcatgtatgaggtatactgtggaaaagcggtgtcgaaatcgtttaaaaactccatgaagaatgccatgtctgcatctgcagctgcggacctggcaagtgtatcgtcattggaactagacgttaaagttttggcagcaaaactgtggctgattagaaagcttaccaggagaatatttttaatgagggagaaagaaggagcaaatatcattgatacgcaatattttcaggaatgttgtaaatggttcgtaactggatatcgaaatcacttgattagaaacaatacgccggaatatgatcaggtaaagcagaataacaaagaataaactttctcgattgagagtgtctttttaaatcatccaagctcttgaattttctagcatagccttggatgacagcaataaaaaatttgccaggatttttccctatttgggcgttcaatgaagataacgtttgaaatattaaaaactaaaaaaagaaaaaggtttgaagcaattaataatttattaagtttttttttatttatcatacttaagaatatggagaccacgggttttcttacacctgcgaagaccttgaacctaatatatttgtttaagaaaacaaataagcgattgtttctaacattaaaacgaagtaaagacatggcttgactgaacctacacctcctgtgcttgtacttgaacttatagtattagttgtttgagagctttttgtttcatttctcgacgaagaaggcaatggcgtgaactgggtgactaccgtagaatttgaggattggtaatttatagatgttatgacgctggaagtgacttttggtatagacgacgatgatgaagaaccggtgaaattagcagcagctaatgaaccagtaataatgctggaagaggtggtgcttggaagatgaagtagttgatcgttagaatttccagtgtcaagaaaggtgtattgcactttctgtccaagggcagtattcaaatcctgagcatttgaatctgtgagaagttgcgcttgaacaatgaacagttgtagtagcacaattggggcgaaagctaaagagccaaattgactgatcttcatattttttttgatttgttgacgagctataggatgatgaaacggagggatatcaaagtacgttcttcaagcttacaatttctcaaggtgctttactggtcaagatattcaatatatagctaaatatttatacaaaatgtttgttgacggtttgtttatagtgttttcaaaacaccacgaaaagacttcattcttgcattcttttttctacaagatgagtctatacatctgaaactgcgacgccattttttccgctgttcggggcattcttggccaaatcctcgaaagaaataaaacgtcaaaagtaaaaaaggtgggctagacgaaacgttattatacgtcataattgtagccgtgtatgagtgggtggaacttgtataaataaacaagttcttacttatcatattctcgcatgcaatgaaattctccagattatgacgcttaggtctggccagacggctaatgaggtccagaggaaatagaaggattgtaagcggcctccactaaattttgacccctcatacatgcttgttcaaacacaaaagattgaggttgaaaacttggcaagaattgggctaggagaaagtggccaggtgcttcttgttcagaaccaagcagatatgctagcacaatgtgcaccgttctatttttttctatagtgtgtttacatttcttggcacattgcgttcggtttcaaatttgtataattattattggagcgagacaggcgtttctgtaccgctgttatttttaacatccactgcgttttatgtatctctaaaattgtgcgttgcctttcttttgtttatatttttgttcaaaaaatgagttaataatgatttttcatcttcggcttaccggtcttgaaaatatttgttaagacaacagtggataaaataaaactaaacaactcaagcaaaagtattccacttcttaaacaaagcccaactgaaaggttgcgaaatactatgtcattttgatttaatcatctaatgctcgagaaaatttcagagccgtaatacttaagtaatcggaagaaaagtatctcattcttcatttttctccaaatatatacctcttgtgtgaaaaattaattgtttcctccacctcctttgtgtggtgggcaattgtgtgcttccgagtaaataacaaaacataaggataatatataattctgtttttttgtctaaaaaaggtaaactatatataacaaacacagtatagaaacacaatatatcggtcattgggtgagtttaagcattagcagcaatggcttgcttaatagccgctgggttggcaccaacaacctttgcaacttccttaccgttcttgaatagaagcaaagttggcatagcggaaacttcattcttttgtgcaacatcacccaattcatcgacatccaatttatagaaatcagcttgtgggtattgttcagagaatttttcaatcattggagcaatcattttacatggaccgcaccaagtggcgtagaaatctacgacaactagcttgtcttgagcaattgcagagtcgaattcgctggcagttttgaattgagtaaccattatttgtatcgaggtgtctagtcttctattacactaatgcagtttcagggttttggaaaccacactgtttaaacagtgttccttaatcaaggatacctctttttttttccttggttccactaattcatcggttttttttttggaagacatcttttccaacgaaaagaatatacatatcgtttaagagaaattctccaaatttgtaaagaagcggacccagacttaagcctaaccaggccaattcaacagactgtcggcaacttcttgtctggtctttccatggtaagtgacagtgcagtaataatatgaaccaatttatttttcgttacataaaaatgcttataaaactttaactaataattagagattaaatcgcttattgcttagcgttggtagcagcagtcaacttagcttgttcaaccaagttttgtggagcatcgaagactggcaacatgatttcaatcattctgatcttagagttgtcgttgaaagacttgtcttgggtcaacttgtcccattcaccggtggtagcgactctgtgggtttcatagtccttagcaccgaaagttggcaacaaggataggtggtcccaaccttgaatttcgttgtattgagcctttggaccgtgaatcaacttttcaatggtgtaaccatcgttgttcaagacgaacaagtatggcttcaagccccatctgatcatggtggagatttcttgaacagtcaattgcaaagaaccgtcaccaatgaataagataactctcttctttggatcaatttcttcagcagcgaaagcagcacccaaggtagcaccagtggtgaaaccaatggaaccccataagacttgagagataccgtaggtgttgtttgggaaagtggtttggttgataccgaaagcggaggtaccggtttcagcaatgacaacatcaccttcttgcaagaagttacccaattggttccacatccattcttgcttcaatggggtagaagctgggacagcagcgttagctggagttctagctgggacagcaactggcttgtaacccttagcggcgtcagcaatagtggtcaacaacttttgcaaaacgaatttcatttggacacctgggaaagtggcgtttctgatcttcatgtggtcggagtggaattcgacaatgttcttggtcttgtaagagtaagagaaagaaccggtgttgaaatcagacaacaaagcaccgacagacaaaatcaagtcagcagattcaacggcttccttaacttctggcttggacaaggtaccgacgtaaacaccaccgtatcttgggtgttgttcgtcaatggaacccttacccattggggtgacgaaagctgggaattgagtcaagtcaatcaacttcttagtttcagccttgacgtcgtgtctggaacaacaagcatcagccaagataactgggttcttagcatccttgaccaaagccaagatggtgtcaatgacttccttttcggattcagcatcgtttggcttcaaagacatgtcaattggagtttgcaacaacttagctgggacgttcaagtcgaccaagttagctggcaaacctaagtagactggtctttgggtgacgtaagtggttctgatacatctgtcaatttcagctggggcggtagcaatgtcagtgatcatagcagtggtttcagaaatgttggcagacattctgtggaaaacagtgaagtcaccgttacccaaggtgtggtgcaacaacaattgcttagcttgagcagagatggatgggacaccaacaacgtgcaaaacaccgacgtgttcagcgtaagaaccggcaataccgttcaaagcagacaattcaccgacaccgaaggtggtgatgatacaagacatacccttgatacgagcgtaaccatcagcggcgtaagcagcgttcaattcgttggcgttaccagcccatctcataccttcaacttcgtagatcttgtccaacaaggacaagttgaagtcacctggcaaaccgaaaacggtgttaacgttgacttgctttaatctttcgaacaaatatttacccaaagtaatttcagacattttgattgatttgactgtgttattttgcgtgaggttatgagtagaaaataataattgagaaaggaatatgacaagaaatatgaaaataaagggaacaaacccaaatctgattgcaaggagagtgaaagagccttgtttatatatttttttttcctatgttcaacgaggacagctaggtttatgcaaaaatgtgccatcaccataagctgattcaaatgagctaaaaaaaaaatagttagaaaataaggtggtgttgaacgatagcaagtagatcaagacaccgtctaacagaaaaaggggcagcggacaatattatgcaattatgaagaaaagtactcaaagggtcggaaaaatattcaaacgatatttgcataaaatcctcaattgattgattattccatagtaaaataccgtaacaacacaaaattgttctcaaattcataaattattcattttttccacgagcctcatcacacgaaaagtcagaagagcatacataatcttttaaatgcataggttatgcattttgcaaatgccaccaggcaacaaaaatatgcgtttagcgggcggaatcgggaaggaagccggaaccaccaaaaactggaagctacgtttttaaggaaggtatgggtgcagtgtgcttatctcaagaaatattagttatgatataaggtgttgaagtttagagataggtaaataaacgcggggtgtgtttattacatgaagaagaagttagtttctgccttgcttgtttatcttgcacatcacatcagcggaacatatgctcacccagtcgcatgttgttaccctcatgaaacatgtatgagatattactttgaataggttacttgcatgcatttcggcgtgcgggtaccacctctttgcatgagcttgttcctttttcaagttgaagactatatattttattgagtttatgttatggggaggctaccctttacgtcctggttgtcccttcccgccttgatttggccttcattttttcaattctggcctttagggtagatgtcactgcagcggcacgtttataactttcttctgaggcaaaactatcgttgaaatcgatatccaaatcgtcggagacactgctcactccagtgccgttttttctgtacggccgtatgttaagagagtttacgcggtgcggcaggtcgccgatggactcgcttgatcttctttcatagttgacgtcctctttccttctgacatcttcctcctccttaaatggcaaagcggaagataaagattttaccccatagttgcttgacacggtggaagaaggtatggagtatgatgaaatcgtacccatcgattgcaagtttgtatcatttcttttcttatttctatccaattcgatctccatgtttctaagctcgttttctagtgacagtactctatcagacagcttattgacatcaatctccttggatcttaattgaatgttcttttcgttcaatttagactgcgcttcctttagttgctctcttagcatttcgttttctttaatcatttcgatcttataattttctgtattattcatcttttccaataggctttgtctttctttggtccatatcatctcatcattttgtagtttttgcagtctgtacttgtattcttcaatcaacttttcattcttgtcagtgctattagctactacgttttttggcgttgccaaagacttagacgtcaacaggaccctcgatttattgttagcagctaccattgatggttttgatgcggaggctactgaccctattgggttcactttacttttgttatcatttctcagcggtgaagatgccactctcttggagggaagtacagaactttttttcaggagaaatttattctccattggcccagtttgtttattcgtttcaatagtgctatgggtactaccacttgcaatactgaaattaggtagagttttgaccgtttcttcaatttttttccttttcaaattatccaagtgctctaatgttttcacaaaggtattcatgccaaatattttaattagaatggcgaaactctcaaatccaatagttcttatagcaggttgggtgtcgttgacgatctgaatcacaattggtaccacttcatccttcaagtatctttgcagggtcgagtatccatctttttcttctttcatgcttgcattaaacaattgcgtacactccattctgatttgaggtgtcttgtgcttcatatgctccaaaatatctttcaacatatcttcattgcgtccactggaggctaatggatcgtaatacttgcagatggttaataatgccttcctaatggcctctatcacagaaggtttcttttcctttgtcctgtctaacaagggagtgaagactagtgaaacataatccttggaaaagcctggtgtttttagtttgtcgcagattaattctactgattgagcggctagtgcaacagcttgaatgtttgcatctttctggataatatggccatatatccccaataagttggaataattttgcgaggtgctttttaacttcttagtctgcgatagaacactatcccaaaattcttccagcgcttccactctatctttccatttggacgacgttatcctttcctggaagtccttaggcagtttatcgaggatcgtctcctccggtagcatactgaaggtgtctatttgaactccactttgctgttttgatggtggcatatccgtttccatccccatcaatgtatctccatccttatctatctgatattccccctcatcattcgataatatggactttcttttcctggcttcctcctcttggcttcttttcttttccaattctcttttctcccactcgaataacattttcgatgacgatggctcgtcaccaacttttgcaaacaatttatgaagatctttcacttgaattggttttaattttttaaacagtatctcctctaacaagtcgctattgttgcccgtaaccttatagatctcgacaatcaaattcatcgtttgtgatcgaacgtttctatcaccatgaccggctagttgaggtacgtgctttaataattctggtagaaacgtttgaacgttcacattagtgagcccgaatgcagccatcaactcataaacacaattggctgccgcagcaattaattttggcagttttttctcgaaaaagggtattaccaattccaccgattgcgtaatagatgtatcaagaccacatagtgagagtatacagctcatcgactgcgtcttcgttgtagcccttgaggacgttaagcccttttccacaagcaatggtgtccatgttgatattaaagtaatattatgtgcatttttcaaagacgatgacgcaaaggcatctattaaactattcaaggcaacaatggcttgttcttgagcgaccacattagaatcagttatatattgtgcaaataatgtaggatccctccagtaaatttgtatgttgtcatccctactgatgtcgccaacggagtttctaaaaagctggtttaactccttataagcttctaaacgtgccttccataacttgtacgttaatcgctcttctaggggtaacgttgtataatctacttcttcttctcctgacatagtcaacttcaaactctttaataaaaactcaaaaatactttacactgtaaagatagctgtttctttgtagtttagtaatgctatttggtccctaggtctggtaggttcttcatttactcttcctatggagtgtcaagcagacaaaacaaaaacaaaaacaaaaacaaaaacgacacgaaaaaaaatagattcgttaaccatgataatctttgcaccatataaaggaaaagacaagattgacttctaatgcccagcacaaatattatccaactatttaattaataaatttttgactacttaatcttcagacacagattccttgtctaataatttgtttaattgaatattgacagatttatcctgcagcttgaacaaatttcttgcgcgaaaggttgctaggaaaatcaaaggtagtaaaaacattagaactgtatcgaaaacgtaaaggcaccattcgtgctgacctatatagctttgtaagcccattagaaattgtactactctgacaatggttctaccattaaccagcaatatcccagctaaaagtataaaattgtactggaaccattcattactatcccgcacaattttactaggcgttgccttcattttatagtgaagaaaaagttgactgaacgttaaaaaggtataacaaaatatctgaatgaaaagacccacaataattaggatacgcccagtattcctgctgttccatgaggataacaacccacctcctacagcctgtaggacacgcccaatcatatctgccactacgaaagaaactgtactaaatttcgcaggaattaacatatatgcctccataagaattagacgtgccattttgctgaacaacataaaaatactaagggcgtaaagtgaaggtgctatcaatagaagcaccgattgagcaatgaaagtcgaaatcgaggggctattgataaagactattttcaacacataacccacgaactctaaacaaatccctaaaacgaaaggaaaatgtgtccacatcaaaccgcgggcaggaaagtatattattgtggaattttcctctgacaactcattgttttcccagcgatgaatacgtctcttgctcgtgtgtgttgccattatgatctgcaccaaggcagaaaggattaaaatgccaaacagaacgacaaatgcaatcgctgcacctttgtgaggattgtatgcataaaaaccttcataatcagtgattgctttagtaaaaaaattcctattgaggcagttgagttcttttatcgacaataagtctctagtacagtagtgagagtgtcatgtattcagtaccaagaagaacttatatgccttttataattcatcttataagttgctagacatacaaataatcaatatggaaatgtgcttattcccgctaatatccattaatatccgctgtcatttttcgcaactatcaccaagtggagagaggcttgacaaccaccagaaaaaaactaaatcagcctgcggaacttttctcggaaaaaatcagttagaaaagatcgtacatagggcccttttttgacagtaagattaaagagcaaaacgggacattatagatatgccaccatcaaatacgtgaattttccaagcctcataaactaatagccaacttgcaactcttataatgcaaaactttctccgtgaaagtgtaaaccaccatctgtcgcccatcttttggtgctttcaattaagcctctagggcctgcagcgagaacccatacttgtgacaaatattcagcatggtctctgccttgattcgcccacctgcaacattgaatagaatccgtctctgcatcacattcggtttgcagacaccattcataatccttatctccaagtgtaggcctgccaaagaacactttaacacctgcgggaattctgatctttttaggcgccgcctctaaacaaggatcttgggcaggtggctcaatgatctttggttgtctgaaaacgctcgatccgttaaacgaagaatgtgtagttagagttccttgtgcagtatttttccttgatttggatctgctaaaagcatatgtaaaatctatctcgtcatcagcattgatgtcaggtatatcacttgtttttggtgggtgatggtttctcaaggtagatttcttacttagaagggctgtgttctcattgggctccgtaggttggggatttccatctgataacatggaattatctcccagttctgaaactcggccgctcgaagaaatactcctgacttcatcattaatatcagcagcgcagtcatgatagtcaatataatcaatttctatgtcctgttcgttgccttcggtgccactaatatatatctccataccttcaaaattgtttttgaagtggttcaatacttccagatccttataatctctagaaacccaaaggagcctaacgtttacaccgttgaagtttagaatacgaagtagtggtaagccaaaggaaattcctgaacctccaacacacataaacactctttgcgctttaattagaaaatttaaaggcgaatttattagtgcagaagaattgtttcgaaatggattcttggaagatttcgtggtaatattaaaaggaacagtaggtttagaaatgaaactcaactcaggttcaaaagcccctgtaatgtaatacttttcatttgtacgcaatggaaaatgcccgtttctaataattaacctgaccaaattatcacttggaatactagcaatagtaaaaggatgttggaagggtatcaaatgggagaaaaacctccttaaaaaatttctatggtaaatgttgatccttagatgccctcctggtaggatgggctttttgggtaaatcggttaatgggaactccaaaagagacaatgatgaagaaatgggtactatcgtaactctcgtaacattggtgatatggagcctatagacgatttgtcccgttaatatgagcacatttaaagtggtataatatgaaattcctgggcgagcgtgataatgtagaaacaccaaaataagccatgtgcttacatagtgaacatagtaaaaaactctgtagctccatcgtctggcatatctcacagaggtgatggcaatcagtaggaaaaggccgagggcaataaccccataaatgttgggtagttttctcattttcacgtataacgtatcattaatgtacatgtaatagagatagaaccacgtgtgtagaatagattcaagcacaacaattctggaaatccatttgtggagaggtaacaatgctaagtataacgtgtgaggtaacggtgatggcctcaacgttagaaatagtaaaggtggcatcaaagcaacggaaattctccccattcgcttagtaatttctaacagatctccgttagcgccttgtataacaaaaaacgaggtgaaaacaaagcatattaaacatagttgtagtgactgtttgtgatacatatgtgttttgtgaacccatgatcttctgttgaaaacatgatgctttaaatggtgacatattttgaagaatttgtcagttagcaacaaataattcattaagggtataataacacatattataatgaaagaaattaaaagacatatctgagaatatttgcggactcttaaagttctaaaatgcttgtccacgtcgacatcaaaactgggaagatgttccttgaaccagctaacgatggactttaaattcatgctgaaaataacaataaataaaatacagtaaacttttttagcggaacttctattgtaatttaacgatttaatctgaagagatgtagatgtaataaaactgttaaagtggcaacgtgataattaaaagcttggcaaaaataagagatcaacactagctttttctttttccacctaaatttgaagggaaataaaaaagaaattgaggctgtacagagtgttaatcttccataacggataccaccaaacgtttttaccctaaacttaaattttattacttattttacatgcataatggctgccatgcgtagttcatacatgttatttgcaccctttttctttttcaataacaaaaaagagcttgggcattacgttttcaacacttttaatatttccctttttacatccgtacatataaaatgtaaacccatgcattcatgacaattttacctatttcttaaaggcctttgtcacttctttatgggaatggcgctactttaattttccgcctactttgaaaaatttaccaaggcgaaattgagtgcgctaggcggaagttccagggcacggtcaccgaacctttgtgctgtttcgaacgagggtcccgctggaggttgacggacgcgggaggagctggaaagatggaatggaaggactgcaacactcagtaagaaggttcgtggtagggaacatcaccttctctagttcctgtaaaaataatatgatcaagtttgaatcctcgtattgaaaaatcgcgagttattaagtgtgtaatttagaataccgaaatagcacaagaagagataagataagatactgataggataatgtctttaccagctacttttgatttgactccagaggatgcccaacttttgttggccgctaacacccatttaggtgctagaaacgttcaagtatgtacacatatcccatacgattatgttctatagatgataataggtctcgaaaagaatatgtccccgatttaatcatatttggaggtcagaggaccaaaggtaatttcagaggaattttgaacacgccgggtttagaagagttagaatttcacttcttagtgagggtaaggagaagaaactcaataagaatatacatcctcgactgtgtcaaagattatgaactccgatgaaacagtaaaacgtcaaaaaattccacgggatataattcggtactttattggatatggaagaaaacattatatatgcacaaatgaacgctcttactaacataatttatctttcctctctttttttaggtccaccaagaaccatacgttttcaatgctagaccagatggtgttcacgttatcaatgttggtaagacctgggaaaagttggttttggctgctagaattattgctgccattccaaacccagaagatgttgttgccatctcttccagaacctacggtcaaagagctgtcttgaaatttgctgctcacactggtgctactccaatcgccggtagattcactccaggttctttcactaattacatcacccgttctttcaaggaaccaagattggttattgttaccgacccaagattagacgctcaggccattaaggaagcttcttacgttaacattccagtcattgctttgactgatttggactccccatctgaatttgttgatgtcgccatcccatgtaacaacagaggtaagcactccatcggtttaatctggtacttgttggctagagaagttttgagactaagaggtgctttggtcgacagaactcaaccatggtccatcatgccagatttgtacttctacagaaacccagaagaagttgagcaagttgctgaagaagctgctgccgctgaagaaggtgaagaagaagaagttaaggaagaagtcactgaaggtcaagctgaagctactgaatgggctgaagaaaatgcagacaacgttgaatggtaatcatttgaaaaccttgcaatgtgtgtgaatattgtaaggaattgagaaagagagataaaaaaagagacagaagtatcacttccttttctaatttttctttttcattttttttttaaattcatctatcgtttatctttatctcatatatatttgcttctctctgaagcgtcatcatctatctgtatttttaatgcaatcatagtataaaaatttttaaccaaattcaaaaattataatattttaaaagtttatgcttttgtccttttatattcaagtcatttggccattattacgcttttttttttattaggtaagtggtttcaataattaaattctttagcgggaaggctgactatctatagtattgaagataagttaaattaatgtttagttctgatatttcatttttattattaattaaatttgcactattcgccatgacgggttcacccgagtatttattttgctttcgttatacatatatatatatatatattcttccaggagaaatacctgccttctctcttaccccttgctcaatctaaatcaatccgtgaccttaaatcttctagcagaatgactaagtcacaatcgattttagaaatttgaataaccagctcagagatattactgacaaaaaacttgtaatggcactgttttagcaagtttaagataaatgtatccattaagaaagcattgattttattcggaccataataggtagtcactattagaatatctaaaagttctagaccaataccatctaatttgtgcttattcaatgcgttggtcataaaatttcttattacaggcttgatgaaatccattatcacatttaatttcaacttgtcctttaaatggtagtataagttaggaaagtcctgatagaacttcccctcagtaaccgtgtaagaattcttgttgtccttattgtcatcgaaacgactattcaaccaggtaacgtttttcgtcaaattgatgaaaatagaccgggatagagtttcctgctcttcgttgttacaacatttccttattgctagatacaatgagttgttcgcatactgactgaaaaatccggcttcgtctagttcgctatagtgatataaacatctcttgtatattggaagacgaaaatcgttcggtatcccaaaccaatataagttatgcttacttatcaccaacagcaggtccgtctcatcgccagatgtatgacaacttctcaaattgctccaaaacttttccaattttagttctcttcgaaataagtttctattttgaaactttaaatttaagatgttcctctttgtttccgatttaatgaggttttgtatggatggatcagtatgagtgcacaaggtttcatcgttattattggcaattaatgataacgattctttttcactattgattttccttttattttcctgaatcaaagaatctacactcaaatttttttgtggtctaatgactaatgaagatgatcctgatgagttcctgttgttgtttggagtaaacaaaccatcagaaaacacagaagacgcagaagaagatgaagaagagtacatcgttgatctgtgattcggcgaaggggccacaggactcccctgagagtttgctcgaggaatggcaaagttgtctattatggggacagcataactaatgagattagtatctttatctattgttgtgtccagaattgttgtccaatctgtggtcccggaatgtagggcctcttctttcaaatcgtttcttgttattctatgcctgctatggaatagccgctgactgggtggtacgtactcgtgcatgatattattaaccatgagttgtagctgttttgttatatccaaagaatttggctaacgtatccttgtacgcgtgatttatttatatatacgtgcagcacaatatatatatatatatatatgtatgcgtgcgcttggttatggctcagtaaagcgaaagtaacggaataagcgagggaagggggatctagcgatgagggaatggcagtaacagactgttcccttacaatacactcttgctaaattacatcaaggataatatactattttaaaacaaaaaccagccatttccctaaggacgcgaaacttttgtgacgcgtttcaaataaaaaagaatactgcaaaacgcagcacaataattagataaaactagtggcatatgtcactaattaactatatagtcactaatactgtatatatagccgacacaggctacacaaaacacaaacgcaaaggaattaggaatgtaggtaggtacaccgaggctaactgacacttctgggtcatggacaagcttgtttttagcacatcgtaaggaatgtaaccacgcttgaaaataacaacgatacatatcaaggtagttagagaggcattccagccatagatacgcaaccactttttcaatctgctatttgtattaacttgtaattcgcttgaattccagaatttattgacgaaatagacgaaaaggggtagttgcagaactagctcaaggactacaaaccagtatagccattctggtttctctgatagcaggaaatcgtgttgctttgcgatgtgatcactaacaaccttttgcgcaatccctagttgccatttagcgggaataaccactgatgagtcgatgaatatggtgatgggaatgtgaacgatgaagtaccacaagtagaattgttgctcacgatgtcctagcttcattatctccggtcgcttttctctatatgttttcacgtgagtggctcgtttctcgtacttatttgctgcggttgttccttttatacctactaattcgtatcctgtacaaaagccgataattctttactatgttttcaaaggttttttttttttaaacgatatgcaaattattaattcttttgaatatttctatgtaatctaaaccactttacaatatactatatggaatacgtggcgaagaaaattccattatctcacctccgcttctttctcatctctttcattttcttgtaatgtgccttcctaccgctcgtagatttctcctgaatttcgttgtatttacgcttgaaatacttattagaagcttcatcacccatgagtgtttccaaaatagtcgactttctttccttcctgttcatacgactactataaaactcactcttgtcttcaattatggtaccaatagcaaacctctctggcacctcccaacgttgcttcttataatgtctctttggatcaagagcagctctatgtttaatcagcaataaatctcgttgaacttcacgacgcatgttatcatctggctttggtaaggtaaaccagtcattatcgtttttgtcgctcttgttgggttttcttttatcttctgtctccacactaggcaagacgttcttcttcttcttcttgtttgctaaagcatcaaatccggtttctaacttaggaagcttcttaagattagtttcgatctcttgaaatttactttcaatttctacttcatcatcattattgcctatctgcaaaacatcctcttgttgaagagaaacttgttccttcgctgaattttttacttctagactggcactagcatctcttagtgctccaaataagtcttccacactttgatccatgtttaacagctcctttctcacgtcctctttaattggaaaacttgacgtctcatcgcattttctatttcttttctatcttctgttttaatatgctgaaaaatttttaggccggcactaaccacgaattatgataaaagagaaggatgtttagagaaaaggttttcgtgtgaaagggggaattgcgttgttaactgacatagctgtcttcaatggaatcataacaatgaagttcgaagacctcttggcaaccaataaacaggtgcagtttgctcatgcagctactcaacattacaaaagtgtcaaaactccagatttcttggagaaagacccacatcacaaaaaatttcataacgcagatggcttgaatcaacaaggttcttcgaccccatctacagctaccgatgcaaatgccgcctcaactgcttccactcacacaaacaccacgacattcaaaagacacattgttgccgtggatgacatatcgaaaatgaactatgaaatgataaagaattctccagggaatgtaataacgaacgctaaccaagatgagatagatataagcaccctcaagacaaggttgtacaaggacaatctttacgctatgaatgacaactttttacaagctgtcaatgaccaaattgtaacattaaatgcagcggagcaggaccaagaaactgaggaccctgacttatcagatgatgaaaaaattgatatactgaccaaaatccaagagaacttgcttgaagagtaccaaaaactttcacagaaagaaagaaagtggtttatattgaaagaactactgttggatgcaaatgtagaactcgatttgttcagtaatcgtggcaggaaggcaagccatccaatcgcattcggagcagtagccataccaacgaacgtcaatgcgaattcactagcatttaacagaaccaagagaagaaaaattaataagaacggccttttggaaaacattctttaagccaagattaacataagacaagtttgcaaaatccccaacttcacttccatatgcatattcatttaggtatatatcgtatatttgagaaaaattcatatatgaaacgttattaaaacatgaaaaatagaatgtgttatcgggcttaactatattctgccattcaatgcgtgtttcttgaccatctctcgcactacctctgacggtacatagaatgggttatgcttctttgtctttttcgtgtgctcatattgtctttggttctcgaactcaacctcctgggttaaatttatattaaagaacaagaaatcctctatgctatcattattatcttgagattccatctcaaatagttcagaaaatccggtgttcccgaggtcatcgtattgcaatttttgtttgtctacctcattactcaaattgctattggaggtgcttttgatagcatcactacatttattatgaagcatatccattaactccgtcctgagttgttccgacgtgtgtcaacaaaaggatttactaagaatgttgtattttgagttttaaaaggacgtgcatatgcacatacatatatatatacatatatgcgtatttatcatcactccgtgctgtttagaagctgcacatattatgcatctatcgcgatagtattgtgagttggagataaagatttaatcatttgtgcaacaaccgctttctactgtaggcatagaatttcgcgcatcccaccccttattaacaatcacattttttttttttaatattaatgactccggtggtcgtgattgtaatcttgataacaatcgcgatcatgatcacgttctttagcctcattatcgaacagtactggaggtgaataggcacaccgtttatctaaaagttccatgatcgtggattggtccctcaagatggaatcatacgtatctacaccaccgtatctactagtggtaaatctcaaaatatccccagtgttgccacggttcaaaacatcaatgtggtccagtaatagctcatacggattcgttcgtggacgaggcagtgctcctctatgaatattgaaccgatgtttaattttccacatctgagattctaattcagaatagtttcgacgtcttgcgtccaattctgattgcgtccttggtttaacttcgtaatataattgtctatgtaagtcttggtattctttggcgaacataaagtgatttgaccttaattgcaactccaagctgcttgtagtatatggtcttttcatatcatttgatttatccttactcgaccttttaatagaaaacctcctgatgaagtgtggcacagcaaccactccaaatttttctagaggctttgtgggctttgttgagcttcttttgtcaattccaaggcaagaaaagtcgtcttcatcggccaaatattcatcttcaaatgtatgtatcgtatcatcaggcaagtgtttatcatcgtagcctgtatctgctttagttggagattttactcgtttttgaccaccagatgtatttgcgtcgcaattgctaatgtattctgcacctaaatacaacttttctaagtccgctggtaaagctggatcattgacacccagtggacttgtcatcgtgaatcgttgtgttaaactaatgaaagaaccttcctttacatttttgtccactctgtttttgcctttatcttgatcctcgttatcaccatcggtaaaatcttggccgctattaattcctgaagcaacgttaataccaccaccaatcctgctgtccaacatcgacaaggcatgctcacaccttccaccatttattgatagcccacttagtgtcagtaacctcgtatagaatccatataggaaatttaaatttgaacacgaaacaccatactttttggccaaaatgatgggctgatgcaaaagaatttgagcaggatattcaaatcggtggtagaaacaataaggctcaaacggtaaggataaatattccggatgttcgtttgccgtagagttgataagttgcagttttttacctttgcaatattctacgattttcccaaaattaatctcttcttcaccttgtgattttactagcaaaaaccttgcaattttgcttccacattgtgcaaagcaaattccaagtaactctttcaccagatctttaaaaataatttctgtggatttgttttctaacattttctcataatcaaattgttcatagatgatagaaaggatgttaagtgagattttaggaataagcaattcccacattttcaatgccatttgttttgggtccaaaattaatttagatttcatccatttcgcaacggtcaatccaagaaggaacctgcgaacatttgaacccttaatcccttgcaattctaacgaagctgctttcgtgttttccagaatggttggacttgcttcaaaattagcatcacaataagttaatcccaaagttattacacattgatcgtcgttgaccaatgcatatgatccaagcgataactgtctgcattcaacctcacacgaaatggaaataacacacttgcacttccctccaaaataacttatggctatgggctccagttcgcaaccaaaatcagtgctaataagcacagtcgtattgtcgttcgtgtaatctgacaacaatcgacaagttgtttcgaaagactgtaaggaaattgcagacactaacacaatgtcaattgaatacgtatttgcaccgttatgttttaatttgtggtgcagctctttaatatccttagtgagaatgtttggcgtgtagaaattggcgcctagttttgtcgatttccaggcaactaactcgtcactagacacatattgcgagaccagtattataaaagagttgctcaaacttagtctccatcctagaaattgtgctgctggtgtttctccaactgtaaaaaaaaggaaatttaaatttacatttatatgttagtaaatttttgttcgaatgtctgttttcttaaacttctttgccatacctattaagcacgttaattggttttcttccataactaatgcgagttcttgccttcaaaaaaagaaagaaaggcttaggaatacaatttgaactagtatttgtatcgtgcgtctatgtgcttttgttaatatgaagcgtattattaactccattcattttacttttcattcaaattttgatagtataatatgcctttgtctgcccggaccctgaattactgacacaaaatgaagggatcagtggccctgaaaaaaaaaaaaaaaaaataaacggcgcgcggagtaattatgattatgattatggttatgattattattacaactcactattctaagtctatatcgtaaataagggtcgtgtccgtagaattcccctgccagcctctgttgccacttgtgcttattataaatcttgaagtggggtcgaggtataagtttgatataataccaccgtgatggcccggcacgatgaggaacggcactttagaactctttgtagtcgaattcgaagcatctactgcaatttcaacgttgtacaatctgatattatcccgcgatgcacatagtaaatgcttgttattaggcatggctttaacacaagagacaggccctgaaatagaaggcagtttcaaattatggataggtttcgagggcatcttcaagtcaaactgctccacacaggcattccttctccctgcatacacatgatcaccatctacaccccaacatgcggacaaacaccacggtgggacgcctgcacctctctccagagacaatgctggcgactgcgtcatgcgtcggtcccaaatatgcacggaaccgttcaaccctgaggtcataaaaacggattcatcatagactatgttcaaagattcttcagatatctgttctttgttctcttcaccattagaaccatcccccgtctcgacgggttcgttgccagcatcttgcttttcgtcttcgtcttcatcaccaaacagagaatccatatcgtcatctgcattttcattctctttaccactgttgacgttaccggacacatccacggacgagtacagcggccgcatttccaaagatgacaattcagaccttgattttttaaactcattaactatgtcacccgtctgcaaatcccattccaaaagacgcttatcccaggaaccactcaaaaacctgtcctcttgaccgtttaatctcagtatgttaacgatttgggtatgtccattcctgcccttaaaatagtgcgcaatgctcccctccatgtagcgaacgccctgcatggtaatcccaccattctgtagcccgctcagtataaagaggcattcgctttggacttccaaagaatgaacggggctaactttgggctcgtaatctgtcttattagcggagagtttcatttctgattttttctgcgggatctcattttcccagtacgactgcaagatacccgcgttctgaatagactcagccaacgaatgcttctgcaggatagttagagaaagtttcccctcaagcgtgttcagcaagtcgtacttccttatgtatccatcgctaccgcccaaaaacaggtacttgagacccctggacacggccaacgcattgacgtgcgtctggatgggtatggctgccgtggggtagatattgtacgaatccgcaatctgtgcggcattcaacatgtgcttatagtactcataaacctctccattagcagaggcttcgtgtgtagaggaagatgcttccctggaccccactcctccatcaacatcgctcaatttcacatcctcggatccaatcttagtaacagcatcgccactatcgcctgcaccgccagcaccagcagcagcagccttttgctcatcatgctggtgctcattcgtcggtgtagcagtcttatccattcttgcggcgtcgtcctcaccatcgtcgtcctcctgttcatcgtcgtcctctcgttcgtcctcgtcatcatcatcgtcctcatcatcatcatcgtcatcctcttcatcttcaccaccgtcatcattcccctcgaggtcctgctttgagtcgttttccagcccactcagcatctcttcgtcatcctcctcgtcatccaccacctggttgttaattagaatatcgtcaacctcgtccattacgtaaaagaagaaaaaaaaaaaaactgagcctttagtacactacagttactgctacagccttttacagcccagcatctggcaccactacgctataatatatgatgcgtctattatgctagaatccttcctgaaagggcattctggaagccctacgtacagagtgacaatatattagggcatccataaaaatagattagggcagctctgccatttttttcatagccgaaagaagaaaaactgaaaaaaaaaatgatacgaaaaaaccgcgaaacgacgccttttgttgcgattgtcgggcatcgcaagttacgacgcgttgtcccttgcatcgctgccgtgtggcacgacccactgcggcctaaacgaccgagatcggtgcccggggcagaccacccgaaaactcccgggcattatttcggtcgtttagttgcgccccagggcaaccggggtgtatacgaggccgatggctgcgataaacgaaaaattcaggctcgtataagtggcacaatagaaggtgaagaagaacagcaggtgcattgaaacaagaggttcagcagcgatcgggtattgttgttgctgctattatgtaacggtcgaaagaaacatcgcggtatatattagaggcggatttctatctttcttatcaattcgttttttcattcacttgttcattcattctttacatttgtcttgttctttgaagtggttgcagaggaggtcagtttgttgcatttgtaaaaaaagataataagaaaaatattcgtctagatttgagatatggatttggtcttagaagtcgctgaccattatgtcttagacgacttgtacgctaaagttctgcccgcttcgttggcagctaatattcctgtcaagtggcagaaattgctagggttgaacagtgggttcagcaattctacgattttgcaggagactttgaactccaagaatgccgtcaaagaatgtagaaggttctacgggcaggtgccattcctgtttgatatgtcgacgacgtcttttgcatcgctattgcctcgttccagcatcttgagagaattcctctcactatgggttattgttacgatctttggtttactactttacttattcacggctagtctcagctacgtgtttgtgtttgacaagtcgattttcaaccatcctcgttacttgaaaaaccaaatggcaatggaaatcaagttggcagtcagtgctatcccatggatgtcgatgttgaccgttccatggtttgttatggaattgaacggccattctaaactatacatgaagattgattatgaaaaccacggtgtaaggaagctcattatcgagtacttcactttcatctttttcactgattgcggtgtgtatttagcgcacagatggttgcattggccaagggtctaccgtgctctgcacaagcctcatcacaagtggctggtctgcacacctttcgcatctcattctttccatcctgtagacgggtttttgcaatccatctcgtaccacatctacccattgattctgccattacacaaggtttcttatttgattctgttcacttttgttaacttttggactgttatgattcatgacggtcaatacctatcaaacaatcctgccgtcaacggtactgcctgccacacggttcaccatctatatttcaactacaactacggtcaattcaccactctgtgggacagactagggggttcttaccgtagaccagatgactcattgtttgatcctaagttaagagatgctaaggagacctgggacgctcaagttaaggaagttgaacatttcatcaaggaggtcgaaggtgatgataatgatagaatctatgaaaacgacccaaataccaagaagaacaactgaatacggttgccttgtttgtctcatcttttttctttctttcacgttcaagaactttcacacaacgaataacgtttatatatttatatacacatacatgttttaagatacgcatatcattatgatgtacacctcacgttagtgcaatatgcgctattcgtatattaaatttttgcgttcatttaatggctctttttcctattctagtgaaaaaaaaaacagaaaatcgaagagctggaaaatttaagaacaggcaaataggaagctggaagctttaaaatgcccaagatttcggtgaagcgcaagtgttaactagaaaaaggccgccactactctataagcaaaaccttatgtccatagcgcgattagtatactctcttttcagaagagtacgatcggttctcttacttttcattaccatatcgctattgttttactatacgttccagaatgaaatcgatatcttgaattcgtacgctttaaacgactcactaccgtccataaacaactatgagcacaatacagaaggttcttcgaaactggatcctccagacctatcgtcaaccggttctgaccgaatagccaccgacaaggaaaatggcaacgttgcagtggatttgtcagatccagctacattgagagaaaaaaacaagtactttcccttgctgttaaagggatcgtctcaccagattggttcgaatttaccaatttcgtctcttttgacatataaggaaaagtatcccgtcttgttcgaatactcatcaccttccttaacttctataagccagaatgacgttcataagatacagccggcaatgcaattgccaccagatgttgatatgataaaacagataaaggacattttcatgaaatcatggaaccaagagcagttgctgctgaaaagtaacctcagaagggaatctacttggcccatagatctaattgattctctagatacattgtatctatgtggcgagacgaaactttttcaagattctgttaatataatagaagattttgactttcgagtacctccgttagcaatggaagttattgatattcctgacatcactacccgtgtcctagaagggttactgtctgcatacgaattatctatggataaacgattacttaacaaagcaaaacatgttgcagatttcatattaagatcatttgatacccctaatagaattcctattttgaaatatttttggaaatctgatctgagaaatcgatttccagaccgtactgttccatcaggtcaattgactactatggcactcgcgtttatcagattgtcacagttaacccgtttgaataagtattttgatgctgttgaaagagttttcaccactatacgtcaatcatataacgaatttgatatggagtttatgctgcctgacgtcgttgatgcctctggttgccagttattaactcaagaggaaattgagaatggtgcacacctaaagggatccagcatcatgaaaagtatcaatgaaaatttcaagttcgtacactgtcagcagttagggaaattcttaaatcctccaatagatgataatagcctccaagaacaatctcaataccaggcttatagaattaatgaaaaaacagtacccattctagaaaatctattcaaaatcaatgacctcttccaatcttcttatgatatcctggacggctcaagtaaaaatgctaatgctgcaacgatggaccccagtattggttcagaggtagaagcagtcgacgaaataattgagaaaagaaactttaaagacggtactaaaaaagattcgacaaaaaacaccgtaggtgataaatcattaatagactcgcaaacgtttttaacaaattccatcagtaacatttttaaattcatgacttttcgacccatgttgcccaagcaaacggaaaacaaaaagtttaattttctgaattccattctaacaaaatctcaattcatgcccacgactaatgagctagatgtcacgataagaaaatcttacgatgtctcgttatactcatgcagacttggcggcattctaggtttaagttcacgtgttccccaccgaggcggtgtcaacacgaaatatattttaccatcgtcactattggaaatgagcgaaataataacagaaagttgttttatgctaatggaggagttcgacgggctgctccctcaaaaattcgagttggacccttgcactgatgagactaatgggaattgcgagtttaacggcgaaactaaatcacgaatgattgccaacggcgaatatgaaacttttgaaaatgacctagatgtcgggatcaaagtttcgaattatgggaaaggtgggaatgaccagaaagctaagagaaatgtactaagcaaagatgggataacagagactcaaaacataaaaggtgatactgttggaagctcgaaatcgattgctgaaatagacggcgacgaagtaacgcaaatacgtagagtttttacgcttggtaaggatatcaaaccgcatattacaacggacgataccatgggttctcagtggaaaaaccatccagactggccattttgggtcaacaaggtagaatccagaagattgttggattcgaatatcattgaatctatattttatatgtacagaatcagtggagaacaaaaatggagaagcatgggtaagcagtcttttggaatcttaatgcaagaattaatggaactaaacagtggtgccaaaggattgtggcaaataaaggaattttatgaaaacggtgaaaaagtgaacaatgatttacctagctattggttctccagaacattaaaatactatttgctactattcagcgatggtgacaaggtttccctggacaaacacatcttaactcaaggagggcacataatcaaaaagaaatgaagttaacgttagaaaaatcgtacgcacatacatacatacatataggtacatatatacataatgagaagaggagaaaatgaatacttatacagtaatgtttatttttttgggattaagtgtcgttgtggtgatttctttacacagccaatgggtattcgccagcccagtcgtaaatttcctttttccaggtgttcaaaacatcagagccttcgtcgaccttggctttgaagtcctttaatctacaagcatcctttggcaagctttgttgaacttgttgagcgaattctacagccttgttaatgtattgaacaattctgtggaaatcttcttcacccattcctctagtggtcatggctggagccccaatacggacaccacctggaaccaaagcagatttgtcacctggaatagagtttttgttcaaagcaatgttaatcttttcacaaatgtattcaacacgagcaccatcaacacccttttctctcaaggatactagaaccatgtgagaatcggtaccgttggaaactaatctgtagcccaagttcttaaattcactttccaaagccttagcattcttcaagacttgagtttggtattccttgaattctggagtggcagcttgcttcaaagcagtggccaaagcagcaatggtatggttgtgtggaccaccttggtgacctgggaaaacagagaagttaattgggttttccaagtcgtatagaacttccttaccggtcttagggttgatagatctcacacctcttctgaagaaaatcatagcaccacgtggacctctcaaagacttgtgagtggtggtggtaacgatatcagcgtattcgaaaggagatgggatgacacctgcggcgatcaaaccagaaatgtgggccatgtctaccatcaagtaagcaccacatttgtcggcgatttctctcattctcttgtagtcaattaaacgacagtatgctgaagtaccagcaacaagaacctttggtctatataggatggcgttcttttctaaagtatcgtagtcgataataccggtttctgggttaactctgtatgggaaagattcgaagtatgtggaaacagcagaaatttttctgttttcagtagcgtaaccgtgagacaaatgaccaccatctggtaggtatagacccatcaatctttcatgaggcttcataatagcttgataaacctgcaagttagcaggagaaccagataaagtttggacgttaacaccccatttgtctggagtaacatggaaagctttcaaagctctttgttgacatagaatttccattctgtcaatgtgttcattaccaccgtagtaacgagcacctggataaccttcagagtatttgttggacaatggagttccaagggcatcgaaaacggaggttgaggtgaaattttcagaagcaatcaaatcgatggagtgcttttgtctttcaatttcatccttgataatggagtccacttcagggtcggtgtccaccaaatgagaggtgatcaacttatgatgagcgtcggatagagtgtaaggcatgttaaggaggattcggtttaagctgttatgctttgctatggggtagtatctttcgtaaaggttacactagaagaaggaaagattactgaacgcaaactaagggaagcaagttctgcattatatataaaacaagatgaagaagactcatggttcggtctaagatgattatgaatttaaaaattatacagagtaaaaagcgaacatgagaaacccaagagatagagtcaaacctttatggtcaaagcaacctgaaagggtcatttctcaccaggagtcatgtttcgtgtgtgaaatatttgaaaaatttcacttcttttttctttttttttttctacattaaaaatcggtgcgttgtcttttcaaagatgaggtagatgaagatggtgactccggctgttcagatccgattgactcgaccgactctgtttcctgtggtggcttcaagtagttgtccatgtaccattgcaattgagctatgctctctttgatatcactataagcagtgtgggcagcttctttttttggattacgtgcttgtaaagcgggattgtgtctgcgggcaacttccatgatgctactgacgtcaactattctgtaaaagagatgatcaatgaccttgggaaactcgcggaccatgaacaagcggtccatatgtacactattgcctgccaagacgccaacgttcttgtctgggatgtagcgctggatgtactcgagcagctcatcttctacctgggccaaagtcttctcacttgccaaaactttggcggtgagaccgctattaccgtggtgctcaatacaccactcgttcattttgttcatcacctcgggaccataatggatgacgctctcataatgcgagtctccttggccatcggccgctttgacgggtgccaggtgtccatcggtgatgatgcagcaaatctcgataattctgtcattcacgtggtctaaaccggtcatctcgcagtcgatccagaccaagggtttgaacagcttggttttaagttcgggtgtttgcgccattgattgcaggttttggatggttcgaggacgtaagtactgtgaaacggatcttctgtacagcgagaagaggtttgggcgagtgcgagctacgattcttgccggaaacaacaaccacttcatcttgatctcttctgtttatttgtgaaagctccttttcttttttttcattttctttgcaaatcgaaaagttcacactgattttttattagttcttttaagtgcccaacttgacaggaaaaagaaacaccccaaagggaataccagtgtatgtaaggcttgaattatacgtatgagcatgcgtttgatggttgtcgtcagagccagtgctctgagagtgtcccagatgactacaacccttgtataaaagtacatcttcttgattatttatcacgacacacgaggtgaccgattattcagaatcggtaccaaaaaagaaagaaaattgaaggaaatgaaaaattttcaatgtatttctcgaaagcctggagttgatcaaatgttcaaaaaatagggcagaatagcataacacacatcaataacaccgagccagcatgcctaccgtctccgtgaacaagcagcaattatttgatcttctaggcaaaaactacacttcccaagagttcgatgaattatgttttgaattcggtatggaaatggacgaagacaccacagaggaggccttgaaaaccggggaggagccggaattgaagcttgatatcagtgccaatcgttacgatttgctttgtatcgaaggtatttcacagtcgctgaacgaatacttggaacgtaaagaaagacctgactataaattaagcaagccaaccactaagttgatcatcgacaaatcaacggagcaaattagaccttttgctaccgctgctgtattgagaaatatcaagcttaacgaaaaatcttacgcttcttttattgccttgcaagataaattacatgccaatctatgtagaaacagaagcttggttgccatgggtactcacgatttagattcaattgaaggtccattccattacagagctctaccaccaaaggacatcaagttcgtaccattgaatcaaacccaagagtttactggtgacaaattgatcgagttttataaatctccagaacagaaaaacaacatagggagatacgttcacattattgaggattctccagtcttcccagttattatggacagcaaagatcgtgtttgctccctgccaccattaatcaatagtgaacattcgaagatctctgtgaacacccgtaacattttgattgatataaccgccaccgataagaccaaagccgagatcgttttgaacatattaactacaatgttctcacgttattgtgacgaaccattcacggttgagcctgtagaaattgtctctgaacacaatggccaatcccgtttggcgccaaacttcaacgatagaattatggatgtctccattaagtacatcaactcctgtcttggcctagatcaatccgctgatgaaattgctcattgtctaaagaagatgtcgttgcatgccgttcaatcaaaggaagacaaggacatcttgcacgttgacattccggtaactagacctgatattttgcacgcttgtgatataatggaagatgccgctgtcggttatggtttcaataatttgccaaagggtgagaaattatccaatgccaacttcattgccaaaccattaccaatcaacaaggtttctgatattttcagagttgcatcctctcaagccacgtgggttgaggttttaccattgaccttatgttcgcacgatgaaaactttaaatttctaagacaatccgacaatggtgatttagctgtcaaattggccaacccaaagactttggaataccaagttgttagaaccactttattgcctggtatcttaaagacagtcaaggaaaacagaaaacattccttgccaatcaaagtctttgaaaccggtgacgttgtatttaaagacgacaaactagaaaggaaggcgtacaatgaacgtcactgggctgccatctacgtgggtaagaattctgggtttgaaatcattcaagggttattgggtaaaatcatgcaaacttttagaacagagtggattgcagactacggtgctgctgcttctggcagaggttactggattgaagaagacgattctgtgaaaacctacttcccaggtagaggtgccaaggtcatgttcagatccaaagaaggcgctgagccaaagcaaatcggccacttgggtgtcttgcatcctgaagtcatgatgaatttcgacgttccattcgctgcatcctttgtagaggttaatgccgaagtcttcctataatgtaatgttctaacaaaaatttttactgatttataaaacttatatagatagatagacacatatatatatctatatatagaaacacaactaaagtttaccatgttttatataatattactaccgctactgagtaaatgtttagcttgtacttaactttcaaagacagtttttttgataaacatcagtacatttaataatacatccatacatttatgttaatttgtttttcctttccacctcagtgcgcttctcttttgaaaaaatcctcaacaggccacgcgaacaaatcttaccgagaatttcctaaaatgtttcaaactatcatttagctgcatacaatatgtacattattaattgagattaacaactttacctgtactttaccgttatcaaattataaaccaccaaaacaacagattaagaaacaatggccccaaacgtatgatactttaaaaggaatccacgcccgattacgaagtctatgttttactgttattgtaatgattgattgtacgcgaataacaaggaagatagtaaaaccaaaaaaaaaaaaataaaaatgtacgaaacgaagaagcgtctatgtgtttagttgcttttctgtattttaaaaattcactacttgaacattgaactctatatcgactcccttctttttatccgtttctgaatgtttttttgtttgagattgtcatatgtgattgttaatagcagtaggcaactttgtggtttcgggattgaaagaaaatcgtgaaatattcgttttttactaacattactgttctgaaaatttttactaattttcaatctttaatttttttgatatagacttccagaaagcaaaagattgccaagacctttaccgtcgatgtctcttctccaactgaaaacggtgtcttcgacccagcttcctacgctaagtacttgatcgaccacatcaaggtcgaaggtgctgtcggtaacttgggtaacgctgtcactgtcactgaagatggtaccgttgttactgttgtttccactgccaagttctctggtaagtacttgaagtacttgacaaagaagtacttgaagaagaaccaattgagagactggatcagatttgtctctaccaagaccaacgaatacagattggccttctaccaagtcactccagaagaagacgaagaagaagacgaagaataaattcattaatattattttaaatagagcataagttttgtataattaaaatcttctaaacctaataaatatgtttaatgaatgattcaatatcaaaaaaagaaatccattgggcccttagtgcatttttattttttttttttttttttttttttttctctttctgaattagagtacatctcatcgcagggtctctttttgcacgtttttgatgttgcttatgagacgctttgcctttttaacttcttcagtatattttaaatatataccaatttattcacaatatcattactcttctcagtttccaattaacatgaatcctaaaaaagtggcccaattgcccgttcacaataaatcaacgcttccaccacaggaaataatcgatctttttaaaataacattcttagaagagctatatccaaaagatcaagacaatgaaaagtcaccgttaactgaacaaatacaggcggtaaaatctgacctttataacagagattacaatgctgctttcaataacgactcgaaaagaatagcatattgttgtcgttggtcaccgtccagagcaacaagttacgcatcagtatttgcacatttccctgagcttctaaagattatcagatgcgaaattgatgacaaggactcaaatgtgctctgcataggtggcggcgctggtggtgagctggttgcattagcgagcatattcactttatcgagagatttttcgtctaaatttgcctctgctttgaaaatagacaacgaagtaaacaaaaagcctagaaatttaaacatacaactagtagatatcgccgactggtccacagttgttgaaaagctaacagctacaataaagtcgaaatggctatatggtgattcagaagcagagtcatttaacgtcaactttacccacaaggactgcctacaaatgacagagccacaagatatcaagatatatcaaggcctcgacctaataactctactttttactacaaatgaactatttacacagaaaaaagtggagagtataaaatttctgcaacggttaaacgagaactgtgccccaggctgccatcttctcatactagagagtgcaggaagctattctcacattaccatcaacaacaagaagttcccaatccaatttcttatcgatactatcttagtaggcaatagaaaggacaagggaacgacaggtccatggtcactagtatccgagaacgacagtatttggtatagaatggacccaaaactcgactactcgattccattggaaaacatgcgattcttttaccgtctttatgtcaagaactaacaggctttatgacgttttactgttctcttttcattgttcttttctcgaagagtttagaaaaattttttttcttctcatccacaccgaaaaaatattaataagagagttgaaaattcgatttggaatcagaaataaagaaggggccacgatcaaacaagactcatttcgaataattgtaaaaaaaaattagcacaaaacaatatgaccgttcccaggaatcgtcccatggcaccatttggcaccattatcaaatcaagaataaaacaaccccagttttattggtttataggccattttttaaccatctttaactttatacaatttcatctttcaatcacgtccaaacaaaaccaattgtcatgctatagaagatcattattttacatatccgttacatatgccatcgttctttaccagtttttcaaaagtgaccagttaaagttcaattttacgcttttgcgccaagagatgaagaaattggataatttgcagtattttgccatgctattcatactttttctcttatcacagtttaacatcataatcagcggctcgttatacagtcccgttatcttttcaatctttcacttcctgaactattttaaggaaaaccttttgccatttttgcctttgataccacttaatttgaaaaatttgttgaactccaaaataacggtattcatccaaaactacaatggatttttcttacagatggcgcaagtatttgagattatctgcggcctacgtgtgggcctcttcttagtgcccttcaattttttcttgttgttggtaagaagagcaaacgtgtcgtttgaggtagtgggtacaatgttggcaggactaacctatgtatggtttttcaaattaaggtacctacaaagtgaatctatgaggcagatatttaaacaatatgtccttaggttggatgcatatgtcagccgtactttgcccccatattgttcccgtttatggaacggctataagaatttcgttatgacagtgttttggaagatacctgtgtagcatgctcattttaagtatatctaaatattattttgtatatactcacactcctctatagaaagcaaaaaatttcaaaaacgtttgaaaagctttgtttaacgatacttgtacttaattttagagtcagtttcacccctcctctcccttttcatctgccttttggatttggattgtccctcattagcattttttgagcgattatctgcctgagtttgttgagcgccaggcatgaacatgtttttgaggccatataacttgtaaccagcatagatggggcacaatagtagacaccaccaaaatttgaatgtcctgaaagctataataccaatgttaccaaaaagtgatagatatatcaaatcaaaaaaatatgatatcaaatttgtattgtcgttcaagtctataccttgttttactacgcgattgccatcatatttgggcttaccggatagcacaatgatatacagagcaacgaacataggaacgttcaaagccaccagcttaatccattggccaattgtaaccttacgtgaaatgaatagacgtacgatagccattcctaaaaacaaagagacttgcttgtataagccctgaattatttttgcatttgaactagcctgtttcctccctgctttgccagccattctaccaacacaaacttagaccactgcctttggtgtcttcttgaagccacacgtgaatactacctttttttcatctattatctttttttaattacgttgaaatttttcatttcaaaggcgcagaacgaaggtcgactaatttcatgacagtcggtagacgtggagaaaaaagttgattgttaagcctattaagttccactgagacaaagacccacaaagctagctagcattgccgcacttctccagaacaatgttctcctttgtccaaagattccagaatgtatcgaaccaggccttttcaatgggaattgtaatggttgtattcatcatggcatcctcatactatcaattaatcaataataacgcgttctcagtacctagtaatatcgataacgtcaaaactttaataaatgttagaacaagtagatattttggctcacagagaggcaaggcaaaggaaaatatgaaaattaaatttgatctaaatacagatctcactcccctattcaattggaatacaaagcaagtttttgtctatctaactgctgagtataacagtactgaaaaaataacaagtgaggtaacattttgggataagatcataaaaagcaaggatgatgctgtgattgatgtgaacgatctaagatccaagtattctatctgggatattgaagatggaaaattcgaaggcaaggatttggttttcaagttacactggaatgttcaaccatgggtaggtttgctaacttacggtgaaactgtaggcaactatacactgaccgtggaaaataaaaacaaagtttagactagtctttgctctctcaatttttgttaattatttacatgattttttgatatatatgcagttgattatacaatatgatatatgcatttctagaatttactcacaggtaatactctcttagatttcctcagttctttaaaatatgaaagatgtctcatttcaatctgttcccatttattgatcttgcttcttggcattaataagtaatctttcataaaatacttgtaatttgatatgaagtcacgtacctgatcttctaaagtttttaaatcatcaataccgtccaaatatgtgtctaactgcctcattatactgttatatgtatcgctttttaagtatagtctgggctgaaatttattgggctctttttccttcatttttaatgttggccaagatttatcactggactgcgtcttatcctcggatagtttcgttaatagtctaaatttatggatcaaattatacccatgaattagtgtgtcatcaacgattttcataccatacgaaagggttcttggatccttaaataacgcttctacagcgctgttccacgatatattatctaaaataaaacctttttctcgcaatttcttccacagtaatggcagctcatcgattttattcattgcaatcaactgacttactttataagggaacaatccgctgaatatgcttcttagtttaatatttggcgttgtagatgatggcaagttttcaatgttttcaatacgatccatgtatttagcgaaaagtgtttcgaaatctttccattgttcaatttgagctagtaataccaacaatgatctcatcatcacaaatttattattatttgatatccaatcatgctttttgaagaaaagctcattgtaccggttgtataactctaaagcccgctgtgggctatcatgtttcacaatcattctcattggccatgccatgaccgagggatgcagtttgttatacgtaacgtcgagagttccattggcagcattttccatgatgtcttctaccatattaatcgtttccttgatttcctcattattttgtaggctttttttggcaacggccttcaatatataatataaaattttggaattcgctggtaccttattctgtgacattgtcttgtacaagttaattataccgtcacgataaccctctttgtcatatgcctccattattatttcaaaatgtgtagcgtccaccttgattacagaatgttttattagttgatctatgatgctcaatgccgtttcgcaatcttcgttcagtgtaactaaaaattttatcatcatcttgtaaaattcactgtttacagccagttttgaggttgtgatcttgtcgaaaagttcttcacacttgttggcatttcgtaaaccaatataagctttgatggctttgttatacactgaaattagaccatctctccaagataaattctttgaatgtttttcaaataatgctattgcctctgttggcctgttactctcaatatatacatccatcaatgcagagatactttttccagtgtgttggatattataatgttcagtcataaggttgaataattcttgagcgattaaatggttcgtagttttgcaacacatttgtatcaataaagcaaagtgcccctccgtgatttccacgctaggatcctcgcttagtctttttaatatcctaaacgcaccatcaaggtcatttaaaccacgatacactttaagcattatggtatgcgttgctgttgaaggcgttatgtcgtatttcttgaatagttcgaagtggctaaaacaggctgcgaaatctccgactttataatgtgcatatagtaaagattgtaaaacagcgtatgtcggtatcatacctctcctcaataactgtgtatatagtttattgacactatccaattcaccaattctggccatagtatacatcaaaataccataatgttgtatggaaggtagcttaccgataccgaaaagagcattgaactgttgttgtaaggcgtcccaattatgcagcctagaatgagccaccaaaagataatcaaattggttttggtcgtgctgagcatcagggtatttccaatatgttgacgaaaccaaattaaacttctgcatgtgacaatacgtctttagaatacacgtcaggtcagaactcactatcggcaggttatgttcgcacttgtaattccaaactgcttctgcagaagaaaatttcctaatataagttaataagaacaacaacgtagttgcaaattgagacgctattgcgggcccttgcgttagctgaattgctttcaaataagataaataatcggggcgaacatttgattgcctcatgaatgataaaaagtttctcaaaactatcttgttctccatataattcgtaaattcacaatgtccattcactagtttcatccatttgacccatttatatacagcttcttcatgcatattcattataaccatcctagagaaaatcgagttaatgaggtctatcaccattgtcttttgtgttaatagaaaccgttgtatgatatcagagattgcctgatctaattgaatacctctttgtaaaatcaataaagagagaaggaactttttcaattcaggtaatgaggcatcctgttttaacaatctttgtgaaccaatagtggtataaagaaacttctgtgcaatttttataacgttcccataggcctggtgccgataaagatactttataaggtactgtcgttcaaatgttgtggtagctgaattacttgttattgatgttgttgctttctttgttaatccactgccaaccgactttagaggaacacttccgcgcgccataaaatatgagaccaggtttctctcatcctgtgagcataatggtgacgtcgatttatctcgaagcagcttccttatatgatcaggtacgccggtactccatatacccttcttataattataatttcttaatacggcaggagcacaccttttcataatggccaaaaagcgtgtttcagtatactccaacacccttaatcacttaaattcgaagctttgtacactattgcggcctctttcctgggtatcgaggctgcgttagcgtcacctagaaatcccactttaacttacactacatgattttttatttttatttctctattggcccgaaaagttacttttccttcaaacaatgaaaaatttcaaaatcaaacctcatcgcgatagtattaaaagtgctttcacaagaatgatacaggaaggtggtcaagtaagcaactgagcaaaatcaatatgggtacagccaagcaaaatcaaaatagaaagaagtttacgagggagtataaggttaaggagatccaaagaagtattacaaagaaaactagactgagaaaggaataccttaaagctttaaaagatgaagggtatgccgtaccagaaaaggaaccaaaaaccgtggcaaaagaatctgtaaggaagattaaggaagccagggcaatagagggaaagaagaaactagacgagaagaaggagatcaagaaacaaagaaagagaatgcaaaaagatgaattaaacaagcaaagaaacgagcaattggaaagaatcagagtttcgaaggaaaaatttcagaggagagaagatagaaagaagaaattgactcaaagaacaaggacaggccagcccttgatgggccctaagatagaggatcttttggataaaattaagacggatgatacttatacctcctagataatgatattcttcaaaatttcttttcattcgtgtatttacagaaagatctttttatttaaatttacttaattagtgtgtatattaattttatttcctgccttttgttaattcctttttattggaatttgttatttacaagactgttttgcccatgaggacttgactatttcttcgcttgcttcttttggaactcagatatcaattctttttgaacatggggcgctgttggagcgtaatgactaaactctaatgaaaactcacctttaccttgagtcgaggctcttaatgaggtggcgaaaccgaacatcgtgctcaaggcacattctgcttttaatgtaaattcatcatgaccattttcggtatcctgtattactgcttgtaatttattcaataaaccgatgacgttaccttgaaactcgtttggcgatgttactgaaacattcatgataggttccatgatcaccggctgtgccctcaggaaggcgtcacggaaggctgacatagtagctgttttgaatgataattcattagaatccacggcatgaatagcaccatcattgattagcattttaacatccaaaacacgatgaccgatcaatggtcccttttcacatacttcttcaaaacccttaccacatgcagccaaatacttgtccggtatacggccaccaacaatagcggtctcgaatatgttgcctttggtaatgtcatccacgggagataaggtaccgataactctaccatattgaccagcgccaccagattgttttttatgtgtataatcaaaatctgccgggatggtgatagattctctataggaaacctgcggtttacccgtgacacagtccacattatattcacgtctcattctttcaacgtaaatctccagatgcaattcacccatcccagaaataattgtttctttagattcaggatcgaacttcactctgaatgtagggtcttccttttgaaatctgttcaaagccttcgaaaaattcgatgcgtcctttgaatttggcgtaatcgataacgagacaacagcatctggaacatacatggatgacatagagtattgaacgctaccatcagtgaatgtatctccagaagcacagtcaataccaaaagtagcgcaaatttcacctgagccaacttcatcaacatcttccatctcactagaatgcatcctgaccaatcttgcaaccttcacttttttaccagtctttacatttgtaatgtaattaccttttcttaaacgcccctgatatacgcgaacataagtcaattgaccatatttgccttcttccaatttgaatgccaatccaacaaatggctgttgcaccgcaggaactaagttaaccttggcttcgttgttgctcacatctagagctgtattcaacacttcagagggattaggtaagtagtctacaatagcgtccaaaacgggctgaataccagtatttgccagtgcggatcccatcaaaactggtgtaaaagacctagcaattgtagatctgcgaatagcatctttaatttgttgcgtggtaggctccttttcttccaaaaacatttctgccatttcatcatccacatcagcaagtgtttcgatcaaaagttgtcttttttcctccattaatggcttcaaattttcaggcactggccctttttctataatttcaccattatcacccttgttgtaaatagcaactctattaatcaaatcaacgacaccagataagcttgattccgatccgataggaatttgtacagcagcagcaggtatttttagtttcgaattaagttgttctattgcacggaagggatctgaacccatacgatccattttgttgatgaaagttactcttggaacattatatctacgcatttgacgatccacggtcacagtttgggattgaacacctgaaacagcacaaacaacaagaactgcaccgtctagtactctaagagcacgctccacttcgatagtgaaatcaatatgacctggagtgtcgatcaagttgaaatgatagtttttgccctctttatcccaagagcagtaagtagcggcagactgaatagtaatacccttttccctttcaagatccatagaatccatcttggctccaacattatccctaccacgaacctcatgaatggctttgattctttttgtatagtacagaacacgttcagtgaaagtagtttttccggagtcaatatgagcagatatacctatgttacgcaatttattacatcttccaatatcgtctggagtaagtttttgtttgatttcatccaccaaaactttttcttcttcatatgtagaacgagcaagtggactctcatgaaaagaccttctcgagaaacctgaaaaaacttttgaacatgtgaaaaagggtattctacctccaaccatttttcgaggcacccacatcattttctggacactcatattggtgatatattgcagtgctttctaccttcttccgtttcaatctcctttattaaatctcgttttttagatattttcatcttggaaatttcggccgcttgtgaagttccatccccacaataataatgcaaagttatcatattaatatatatatatataaaagacatataaaaaaaatcaaatgtattgtgcatcttggatgccaaaagttacattttctttccttcattccgggccctcaatgatcgtcttgatattatttaacgggtggtggcttgtttcttcgaatgcctcgacagcatccttaaagctatagcgatgtgtaatgaatggtttaagcgagagttttctgctagagactagctcgatggagtcactataatcaccttgacagtatcggaaacagccttggaatgtcagttcttttgttggaatgatcgagatgggaaattgtatttcctcttgtcccattccaacttgaacgatcgttccacctgccttacagacttcgatgcctgctcgaacgcaaggctctgcaccagaacattcaaacacaacgtcagcacctttcttgccgattgctttttttataacactatctacagtaacgccatgtgggagatcacctgagttgacgatgtgggtggcaccaaactgcctagccgtttccagcttgttttctaatagatctacaaaaacaacatctgcagcaccaaagacactggctactttcccggctagcaaacctatgggcccagctccaaagacgacgcaacgggctccaaacttgatctttgctaatttattagcatggattgccactgataatggctctattagtgctccttcctcgaatgacacatcatcaggaagtttatagacgaaatctttcatggtcttataatactttgtcaaggtcccatcaaagggaggtgtcgcagcaaattttaaattggggtccaggttgtatctgccctctttcatctccggtgaaaacctgtcaggtattccgggctcaagtgccaccctatctcctactttaagtgtcttgacgttctcacctatgagggccactattcctgatgattcatgtcccagcaccattggtgattctaccacgtaattggctattcttccatgggtatagtaatggatatctgacccgcatattcctgtcgccttgatctggatgattacttcgttaggatctgaaatctttgggatgctgacattagttagggtgattttaccaggtcgctctagaacaatagcttcttgtgtagttaagtcagtcatgctcaatggtgttctctatcctcaaggcagtatgaatatgtctttttagtgtgtatggatatatttatgtatatacttatacagttttcaattttattttgaattaattcaggagaggggttacaatctcctaagggatagtagcgccggtgacattttattcgctctaagatgaacttgagttcgagtccactttgaggatattatggatttccattaggataggctctatctcactgggatcgcaagccacgccattgcccaaacgaatggcatgtgatgcgtttgcgggtttgacagattctggggtacctaatctcttagtatccagcataaatacttgatttctcacttgatgcatcattggataggcgggagatttcgtggttatgtgtgctacgtctgcaaaatgaatgtgaaattgaattttatcacggccgttatgcaaaacagttttcaattctatacatattgtaatcttagtgcctgcctgagggttataatatactatctgatactcgtttagattatgcaacccaatgttcaccatagtggagtactgacttccactctcatggaatttgccccctctttcattgagaattacttttagagctttaaacaaggatgacgtgaattgtaggtagctaaaaataaaatgataatccattttcgaattatctaagaaaggttgaattatatgttgtgggtttgaaggtgatagttgaactgtcagatttttaatagagtcgtcattcgttgatatctttattgtgcagtctttatcatcttcgtcattattggagagatacttgaaggaaatttcattcggttgtaatgcaattatcttgaagttttcggactcaaaattcttgtgcaatctttccacgacatccgttagtacaaccaattgcatcaatttttgcctaaatttggttagatattgcactattataccaagatttgtaaaactctcctccaaataaaaggctaacggttcttcttgtacaaaatgaatgtatagtttatcaatctggcattgaatcatcattgtgtttcttttaaatttagcatacaatcgtatttgggaattggagtaatctatcctcagaaacatggaactttctaatatggagttcagcgcttttgaaccttccaaaaatgactccaattctagagttattattgatatgttatcattagtattacttccttggataatatattgaggtagtttttgctcgttgatcatttcagaagaacaaatcttattgcgaatttctagttggttcaaagaatcgatcaacatatggtttataattctgtttaaaatagttctttgcaatatcataattttttgatatgttattgactccaatttgacagtcatcacgttggaattgtctaaatatttgagattccatttcccacgttgagagacaattttaccgattcttttttccaccacacatgatgttttagaggatattatcgataaaatcaaataccagttgagcggccaatgtggtagtctgataaataggtccctttgtaataacaaggaaacatcactattagtagtgctgttaccagcaatagcatatttattatcttcttttttaacaacgctttcgccgccagtattcacttgagtcctgattggtttatcaatcttaataatcctgctgcatgaccatcccgtgttttcaaacatggtggttaaaacatgaataatcttgtccagtttcagctgctgtagtattcttgccaattcctctggaccttcagctctatttatctttgacgcgtaatttgataatagtggagtaggattcctaaaataaaactgcccgctcaataaatcaatttttaattgaataggcgccatggaaacacatgtggtagggagttgaaataatagaacatccgaattttcttcgtcttcttggaatatatcccttgccaacagctccgatctgatgattctagcatgattgaacataatttcatccaaaatcccttcgatattagatacaatattgttataaattacaggcatatttttggcccttgatgcactctggttgtcccattttaagataagactttctgttgttctttgaatgccaatagtgatcttacccttactgtccattttcccattcagccaatatctaactgtaattgtactttttttagagtcatagttatggatcaaattacttttggaaaatttaccgccgttggccagctttaaaaactctctatgaaccatgtatagctgtaatgtcaacacgtatttgtgcagaaaattgtatagggataataatggatcattacttttcaaaagaatttcattgatcaacttctctaatcttggcttattcaaaggaaggttatttccgttggaacttgagttttcttcattgttctcactatcgccgttagtcgaagtagcttctgtaactgctgaaacagtttgttcagcttccgtgttaaacaacaattttaaatccacaaaaaacagaggggactgtctattaacagtcgataactggatttcaaattcattagggacagtaaagtagattctaccgtttttgatatgatagctgtttaatggtttaggaatgttcattaatgcaatttttattgagacagtcaagttcaaatcttttaatctctgtaaaatcaatccaatgggaactttggccattccatctaccatatccatagagttactgacaccgcttaatttaaagttgtgtgtaggtagatttggcctcccaagactcaaaacttccaaagcggtgaccaaatccacgttgggcaatttagcattggtcatagagtttagactgcttttcaaagcccaaatacaattgttgacattcatgttagtcgttctaaaccagttcaacagatcgattagtacgtgaaagttgttttgttttatagtacgggtccatttcacaagcacgtaaagtttcaaaaattgtgtccttaggaatataatcagctgtaagaaacgtattttctttgcggagttaggctcatttgcctgggtgtgaacattagttttcatgtactgagcaagttccttcattgtaaataccgtcaagttccttattactaatgccagactgacttgattaatctcaacatgcggcaacgctggcggaggcgcacttgtcatagtcgctgcacttgtatctttcggtaccatttctagagattctttttgggtggccgtagtttccgggtcggttgcagaagggccatgcagttgagtgttcttaacgggaccctgttgctcttgcccattctgctcggaccggttcttcagtgcgtgcatctcgttagaaagtctctcctcattagccagcatttgtggggatcctatcgtggtagtcattgcccagccaagaaaaccctatactttcctgccactttttaactctttttctgatgatctttacaacagacctctactaaacaattgaaaaattcaccgtttttacttgaaccagcgaccgtgcgatgggacaatcgtttagttaacaataagcgggacaaagtaattaaatttagtggcatctagagagaataattgaacgcaatgaagagagcatggtacgttgaattgtagaatgtggggggatagtatgcgcgagcttggtgacgctatggataatgagttgaatgcagtgaagccggtggtggaagaaggtggcatggatggtgccagaaaatttattaagggtaagagctttcagaagtcttctaccgaacatatgttgatttcgcccggtagggatggttcagtgccattgaatgggttgaaatcgtcgccggcagacccgcacttgtctgatgttaattctatcttggacaatcatcgtggcggtggcgagacagctttgacgtctgtaaataatattatcatggccacttcgacgaatggggacagtgatggggttgatggagatgccaagaggccgtctatttctaactgttcgtcgagatcatcattttttgacaccgtactgagcacgttttccctaaaatcaaattcacaagatacggttactaatgaagtcaaaaatattgaggtccagtttgcatccgaggaggctaataaaaaattccgccaaatgttcaagccattagctcctaatacgagacttattacggactacttctgctacttccacagagaattcccctatcagggcagaatctatctctccaacacacatttatgtttcaactcaaccgtgttgaactggatggcaaagttacagattcccttgaatgaaattaaatatttagataaggtcaccacaaattcaagtgctatttcggtggaaaccgtgactaacaggtacactttttccggattcatagcgagagacgaggttttccaattgattacaagagtttggtcaaaggaaaacttaaccaatatcaatgacgttttggaggttgatgagagggtctccaagaaaaagggaatatcatcgaccccttcttccatattcaacaatgtttctaccaatgcatataacgatttcatatcgacaaccactactgaaccaacaagcagggcttcctacatgagcgagaacgacatgctcatcgaggaggccataaggtccgtggacgattacatgggcacaccaagagcatcgccatcttcttcatcttcgtcgtcatcgtcgtcatcgtctttaggctcttcaacaacttattattgtaggcccgtatataggttaaagccaaacgcaccatttcaatatgaggggccattccatgtacaagaaaccatggactttccttataaacctgaggctaataatgaatacgtgcttctggaacgtcaattcagcgttccacccggcctacttttcattatgatgttcaatgaagataatccagtttttgagttaagctttttgaaaactcaagattcgtccaacatctcacacatagggacttttgaaaaagtcaataaagatggacaacattacagagaattccaatacaccaaacagctgcatttccctgtggggcccaaatccacaaactgtgaggtagcggaaattcttttacactgcgactgggaaaggtacataaatgttttaagtataacaagaacaccaaatgttcctagtggtaccagtttcagcaccagaacgaggtacatgttccgatgggatgaccaggggcaaggttgcatattaaaaataagtttttgggtggactggaacgcatccagttggatcaagccaatggtagagagcaattgtaaaaatggacaaattagcgccactaaggacttggtaaagttagtcgaagaatttgtagagaaatacgtggaattgagcaaagaaaaagcagatacactcaagccgttgcccagtgttacatcttttggatcacctaggaaagtggcagcaccggagctgacgatggtacagccggagtcgaaaccagaagctgaggcggaaatctcagaaataggcagcgacagatggaggtttaactgggtgaacataataatcttggtgctcttggtgttaaatctgctgtatttaatgaagttgaacaagaagatggataagctgacgaacctcatgacccacaaggacgaagttgtagcgcacgcgactctattggacataccagccaaagtacaatggtcaagaccaagaaggggagacgtgttgtaacagagtaatcatgtaatattgtatgtaaggttatgtatgttcgtatggtatggaaaaaaaaaaaaaaaaaggatgctatgtggagaatgtaaggcgtggtagctccggataattcagtctgtaggcttcatcacgggcagtggcctgactctgagagcttgctccggtattaagttgtgcgtttgaaattttctggaaaaaagaaattgattggttgaagctatactcgtcgaaagatttcttcggcagtggttgttgctccacctgcacgggagttgtgtttgcgtttatgttcggcttggctatattattagcgagtgatgtttgcaatttgctgtattgagaatcaatttgggtgcgtaagctttcaataattttgcagaccgcaggcacttccaactttatgagttgcaggtattctcttttatgaatatacgatgacgacgatgacgacgacgcatccatgcgcaaaagctcagggtgtctagatagtttgttagtcaataaatccacatatctaaaataataaataaacgacagcgacaagtcgttggcctggaacgcacactgtgccttttccaatatgccgatgcatgttttcaggtaaattctcaatggtatcgccggattgaagcgataatccttagcgtcctgaaccaattgcttactagacttcatgacctaccggggccagataaagatgcggaaggaagagaaaaaatgtatagtggttggtgaaccgcaacaataattcgtgccaacactttaatcgaagcaaaaattgtcttgtatgttattaatattatctatctaaccattgatttacgtataaaactgtcgatgctcatcgcctagcaatgaaaaaattttttcttttttttttcattatttctctttgttgcgtactttttttcattgcgtttcgcggcaaaagcgattcgagttgactggaagtgtgttatactataaaaagtgtatatgcctatttttggttctgatctttactttactgttaagtactggctgaggcagtagactctgcctctgttacggcagcggtattcgcctcggcatcagcagccgcccacggtagagtaggttctgttgttttgacgtttgccaaggtactgtccaaatgctccttcagcaaggcctcattactttccttctccggacccaccgattgcgtgatctcctgtacacggttcaagaacttgttcaaattgtagcccgcagcagcatcagagacttcttgtgtgtaagggacacccctcaactccttgactcttcttttgtgcactttgccctttaaatgcgtttttaacgctatagcagtctccatgtatttggcacagtgtatgcaatagtgctgaccaaggcccggtttggtttcatccaatggctggttcagaagcttctgtactgattccttggtggacaaatcgttatagatcaggtccaagtctcgtgttcttcttttagtcttgtatctcttcaccgaatatctacccatgatgcgctattgttttatcttcacttgtctgtgtgtttaactgcctttcaattcacctcatctcatctcccgctactttccatatataaaagcaaaattaatttgctttttcccctgtcagtataaaaaaattttccgcaggatatagaaaaaaaagaaatgaaattatagtagcggttatttccgtggggtgcttttttacacctgtacatcttttccctccgtacattttttttatttttttttttggtttttttttttcgatatttttccctccgaaactagttagcacaataatgctgactaaggaaacttttcatctcagaattgatggtcagtttggtttctctagagaatagtttataaaaagatgttgatgtggagcaaccatttatacatcctttccgcaagtgcttttggagtgggactttcaaactttaaagtacagtatatcaaataactaattcaagatggctagaagaccagctagatgttacagataccaaaagaacaagccttacccaaagtctagatacaacagagctgttccagactccaagatcagaatctacgatttgggtaagaagaaggctaccgtcgatgaattcccattgtgtgtccatttggtttccaacgaattggaacaattgtcttctgaagctttggaagctgctcgtatctgtgccaacaagtacatgactactgtctccggtagagatgctttccacttaagagtcagagtccatcctttccatgtcttgagaatcaacaagatgttgtcttgtgccggtgcggatagattgcaacaaggtatgagaggtgcttggggtaagccacacggtttggccgctcgtgtcgacattggtcaaattatcttctctgtcagaaccaaggacagcaacaaggatgttgtcgttgaaggtttgagaagagccagatacaagttcccaggtcaacaaaagattattttgtctaagaagtggggtttcaccaacttggacagaccagaatacttgaagaagagagaagctggtgaagtcaaggacgacggtgctttcgttaagttcttgtccaagaagggttctttggaaaacaacatcagagaattcccagaatactttgctgctcaagcttaagttcttttcaaacatttgaactaacttaaaagagaaatttttttgatttaaattctagtttattaaacagtaaatatatttatacattattgtaatacatataattatgtgtttttttaaagttcagcatgttgggtagtgatatatcctgaagtcaatggacactgttgctttttgtataccagcaggaaaaaaaaaagcctgagctgcagtaacgaagaattgttgaatgcgtctaacaagaaagggagcaatcgataacagggacgtgcgccgctaatgtcattcagattattcacgaggacttctcaacgtctccctcgccttaactgggttagtcccatcaggcgatacgccaaacaacctcaatacgatgaagcagagttgtttgcagagaacattaaccatggcgcatataaagcaaagaaaaggccatcagacgagcatttccaatggcctgagaagtctcctgatcagatcacaaaggaatctgaactccaatgggaaaggatggcgaaattatctgctgttgggcaagggatcctcattctcgtggtagtgggtgggttgggaacggcctacttgcgttggccagaattaaaatcctggtggttaatcaagatgaatggcggtcgcataaatgcaacgcaagagcaaagtggacaggattcgttggaaaaattgatcagacaaaaggccaaaaatctattaagggagattcctcaagtgcctgcctttcaacttggaatagatcatcctggtgtatacatatggggaaggtgtcattctaaggactcattgttccctgttagagtacctaatttggatggtcgtaaattcagagatatcctattagctccctctgacgatttcaacaccaattttgcaattgacgagaaaggcgatttgatatcgtgggatgatttgggacaaacaaaaacgatattgccagatcaagatttgacctcaatgaagtattctagtcactttttgtacgctttgaataaaaagggtgaaatattggtcatacctataagaacgccggatctgatagcttcgcaagtatcatcaagaaggtcgaaattgttgccatggaagacaaaactaagatatgattggaaattacaaacaaatcagattttcaacggtaaggaaggagaaaaacgtgtagtacaatttgacgctggtagccatcatctggtgttgctatctaatttaggtaaggcttattgctgcgcgacgggaaatgatcaaaaacaagctcaagtatccaaaggacaattcggtataccaacattctcacaattcgatgagtttcctcccaataatcaactattcgaaattgaactgctgaacaaatttaagcatgaaggagaagacgttgtccgcaaaagagaaattaaaaagatagcttgcgggtcgtaccatacactggcaatagataagactggtgaaatttatgcctttggctggaataggttcggccaattggcactacctatttcgtacaatctagaatatgtttctttcccaagatcggtaacgcatgcatttaaaccgcatttcccggggatgacgaattggaaatgtgtggatattcattgtgatgatgaaacatcgtttgtgaccattcgtaagcctggctcaacgtcagaccatcattatttcgcgtttggtaatggactttttggtgaattgggcaacaacactttcaagaactcgcaatgtgatcccataaaaatcaagtcggatgacaagaaattgaccaactggagttgcggctctcattgtgtgttcactgaaactgaacaagaaaacgaggtcattgcatggggtaataacgaccatggccaactaggtattggaaagaaaactatgaaatgcgctaagccaatgaacattcccgaagttctcaaaccaggacaagacacgacagatttggactcaatttataacagtaaattacacttaaaaaaggagcaacgtgtagtcaccaatggtaataaaagttgcttatactggcgggtttgagaaacgaaagagcatagaaggaaagtagcgagattcgcgatgttttttcaacccttataatgatgcatgtatatatggtatgtttatttatatatagaactcacggttacttctatcttaaccatttcaacacataataaatacctatgatcaagagaattaacgcgatccaaaagactagtttatctttgaacacccgtttattgatagaggtgatagtttgttccgaaacacccaatgttcttaggccatttgacattctatcttgtaccttggataaaattttgttttgttccactatattttcgaatgattgttggcccatttctagaatgtaatctaattgagcgttacccctttcgaaaacagactgttccttttgtagcccttggtacaacggtagtcccccaccgttgctagagccctctttaccatttgcactcgcaccaccaacgttccttttattcatgatggtctctgatgtactaaaggggttatcggagtccataacatgcgatgctcctgagccaaacaactgagttctggaattattttcgttgtaggattgttttaaatccttaaacttggcagtaaagtcgtgcagatcctgtgttaaagttgctagtcgattagcgaacttaggatcaatttcctctgcattagtatcttctttatatctgtttaaatgttctgcatattgcttaactgttttctccagtgagaccagagttgcagagatggacccttgtaaagaaataggggcggtcacagaattcttttcaaacctggccaactcttgttgtagttgatttttttgcttcacagcatggttgtaaagagcgttctatttgatggtagtagcaaaataccctgttagtattacatcttgttttagcaataatgagaaaagatgcctccggcgatcaaacataccattcccccctcaaatcaatatgattaagtcacgataatatctgcactattgccgtgtttccttctccatcgacagcgtcgatcctgtctattatagccagcacactgaaaatttcaatggctggcttgttgttcgcgtcgcaacttttgatatttataaaaagagagaaggcatatccaaaggataaggtattgtctttgtaaatcaatcaaccaaacctctacggaattttgacccttgaagcagggactattacacgaaaatgactccttccaccccaccaaggtccagagggactaggtaccttgcgcagcctagtggcaatactagttctagtgccctaatgcaaggtcaaaagaccccccaaaagccttcacagaacctagtccctgtcactccctcaacaactaagtcttttaaaaatgcgccattattagcacctcccaattcgaacatgggtatgacctctccatttaatgggcttacgtctcctcaacgctcgccgtttccaaaatcttcagtgaagaggacactattccaatttgaaagtcatgataatggaacagtaagggaagagcaggaaccattgggtcgtgtaaataggatattgtttcccacgcagcaaaatgtggatatagatgcagcagaagaagaagaagaaggagaagttcttcttccccccagcagacctacatctgccaggcagttacatttatcacttgaaagagatgagtttgatcagacacatagaaagaagattattaaagatgtacctggtacgcccagcgacaaggtgataacatttgaattggcaaaaaattggaacaacaactctccgaaaaatgacgccaggagtcaagaaagtgaagacgaggaagacatcatcatcaatccagtgcgggtgggtaaaaatccctttgcatcagatgaactggtcactcaggaaattagaaatgaacgtaaaagggcaatgttgagagaaaacccagatatagaagacgtaataacatatgtcaataagaagggagaggtggtagagaaacgaaggttaacggatgaagaaaagagaagattcaagccaaaggcattgtttcaatctagggatcaagagcattgaagaaatgaaaaaaaaaagtttctggaacgattatattttatttacttacttattctacatttatttgcaaaggggcattaacatcaacattttacatattataatatatacaggatattctatattacaacattaacaggatttttaacttttccttaccgtattcttttattctggttttctgtcttcagaataatagcatatttcattgtagtatttcgtcaaagcgagttaggggaggatgactacaagaaagacagcttcctctcttcagcttttagggaaaatcacaggaacaaaagctggaactaagcaaaagaagatgaatttcattaatggactgatatggttatatatgtgtgtgtggatggtacacggaaaagtgacgcagaaggatgaattgaaatggaataaaggatactcgctaccaaatttgctagaagtgacagatcagcaaaaagaactttcacaatggactttgggtgacaaagtaaaacttgaagaagggaggtttgttttaactcctggaaagaacacaaagggttcactttggttgaaacctgaatattcaataaaggatgcaatgacaatagagtggacgtttagaagtttcgggttcagaggcagcacaaaggggggtcttgcattttggctgaagcaaggaaatgagggagatagtaccgagttatttggtggaagttcgaagaagtttaatggtttgatgatattgttacgattagacgataagttgggagagagcgtgacagcgtatttgaatgacggaacaaaagatcttgatattgaatcctcaccgtactttgcgtcatgtctgttccaataccaggattccatggtaccatcaacattaagattgacttacaatccactagataatcacttgttaaagttgcaaatggacaacagagtgtgtttccagacaaggaaagttaaatttatgggcagcagcccatttaggattggaacaagtgctatcaacgatgcatccaaagaatcgtttgaaatcttgaaaatgaagctttatgacggagttatagaggattcgctaattcctaacgtgaatcctatgggacaacccagagtggttactaaagtgatcaattctcaaactggtgaagagagtttcagggaaaagatgccattttctgataaggaagaaagtataacgagtaacgagcttttcgaaaagatgaacaagttggaggggaaaatcatggcaaatgatatcgatccattactccgcaagatgaacaagattgtggagaatgaacgtgaactgattcaacgtttaagaccactgttagatctgaagaaaacagccataagtgacgatagtttccaagattttctttcgatgaacgcaaacctggacagattgataaaagaacaagaaaaaattcgacaagatgccaagctgtatggcaagcagaccaaaggtcatgatgagatattttccaaaataagtgtatggttggcactgctgattttcattatgatcacattggcgtactacatgtttagaattaaccaagacatcaagaaggtcaaacttctgtaagctcttgtgtctttgttatatgggtacaagatataagaaacataactattacatacgaaaatgtgcatgttatctatatccttctttatatagatgctgttaacttctttttttttttttgggaaaatcaactgttaaacgcgacagtaaaagcagcaaaacattaattttgcttccaagacgacagtaatatgtctcctacaataccagtttcgctgcagaaggcacatctattacatttactgagcataacgggctgtactaatccaaggaggtttacggaccaggggaactttccagattcagatcacagcaatataggactagaaaatatcaggtagccgcactcaacttgtaactggcaactactttgcatcaaactccaattaaatgcggtagaatcttttcacaaaaggtactcaacgtcaattcggaaagcttccttccggaatggcttaagtaggttgcaatttctttttctattagtagctaaaaatgggtcacgtgatctatattcgaaaggggcggttgcctcaggaaggcaccggcggtctttcgtccgtgcggagatatctgcgccgttcaggggtccatgtgccttggacgatattaaggcagaaggcagtatcggggcggatcactccgaaccgagattagttaagcccttcccatctcaagatggggagcaaatggcattatactcctgctagaaagttaactgtgcacatattcttaaattatacaacattctggagagctattgttcaaaaaacaaacatttcgcaggctaaaatgtggagataggataagttttgtagacatatataaacaatcagtaattggattgaaaatttggtgttgtgaattgctcttcattatgcaccttattcaattatcatcaagaatagtaatagttaagtaaacacaagattaacataataaaaaaaataattctttcataatggcagttgaggagaacaatatgcctgttgtttcacagcaaccccaagctggtgaagacgtgatctcttcactcagtaaagattcccatttaagcgcacaatctcaaaagtattctaatgatgaattgaaagccggtgagtcagggtctgaaggctcccaaagtgttcctatagagatacccaagaagcccatgtctgaatatgttaccgtttccttgctttgtttgtgtgttgccttcggcggcttcatgtttggctgggataccggtactatttctgggtttgttgtccaaacagactttttgagaaggtttggtatgaaacataaggatggtacccactatttgtcaaacgtcagaacaggtttaatcgtcgccattttcaatattggctgtgcctttggtggtattatactttccaaaggtggagatatgtatggccgtaaaaagggtctttcgattgtcgtctcggtttatatagttggtattatcattcaaattgcctctatcaacaagtggtaccaatatttcattggtagaatcatatctggtttgggtgtcggcggcatcgccgtcttatgtcctatgttgatctctgaaattgctccaaagcacttgagaggcacactagtttcttgttatcagctgatgattactgcaggtatctttttgggctactgtactaattacggtacaaagagctattcgaactcagttcaatggagagttccattagggctatgtttcgcttggtcattatttatgattggcgctttgacgttagttcctgaatccccacgttatttatgtgaggtgaataaggtagaagacgccaagcgttccattgctaagtctaacaaggtgtcaccagaggatcctgccgtccaggcagagttagatctgatcatggccggtatagaagctgaaaaactggctggcaatgcgtcctggggggaattattttccaccaagaccaaagtatttcaacgtttgttgatgggtgtgtttgttcaaatgttccaacaattaaccggtaacaattattttttctactacggtaccgttattttcaagtcagttggcctggatgattcctttgaaacatccattgtcattggtgtagtcaactttgcctccactttctttagtttgtggactgtcgaaaacttgggacatcgtaaatgtttacttttgggcgctgccactatgatggcttgtatggtcatctacgcctctgttggtgttactagattatatcctcacggtaaaagccagccatcttctaaaggtgccggtaactgtatgattgtctttacctgtttttatattttctgttatgccacaacctgggcgccagttgcctgggtcatcacagcagaatcattcccactgagagtcaagtcgaaatgtatggcgttggcctctgcttccaattgggtatgggggttcttgattgcatttttcaccccattcatcacatctgccattaacttctactacggttatgtcttcatgggctgtttggttgccatgtttttttatgtctttttctttgttccagaaactaaaggcctatcgttagaagaaattcaagaattatgggaagaaggtgttttaccttggaaatctgaaggctggattccttcatccagaagaggtaataattacgatttagaggatttacaacatgacgacaaaccgtggtacaaggccatgctagaataatgcgtttgaagtgagacgctccatcatctctcttaatttttcatgactgacgttttttcttcattttaattatcatagtatttgtttgaaaaaaaaaaaaaaaaatttcccttatcaatgatatccttacgattatataaattccttacctaaacctattatttgtgtacatatatcagagtattattacatatataacctttttctctaaaacaggaaaaaaaaaagaaaacgataacatgctctgccatcctttgttcaccgagcaaaattaaaaacgcaaaatgaattgtccctatgaaattattaaaggaccacatcaccagacttatctctggggggtcctctagaaaataagtcaggtacttgcctggactttcttccagttgaattcctgagctaacatacaattaatggagtgagaatgttcgaacgatccaggagttgcttttttcagtcatttgtttatcagtgtaacaagcatttcctttatttcttttatatcaacctgcaacctattaatattcaattcaacgtctcggagcttttctcgtaccgttttaccatcatccatttccatgctaactaattctgagattacgattacatattgtctcagttctggttcatcaatggctgataaaactttcattacattttggaaaaaatcttcgtcatttaggtctaaagtcaggatttggttccttatagactctctacgatcttttttcaagtttttttctgaagaaatatgtccattttcattagtgacagcggtagagtcctcttccgctcgaaccaaactatcactgccggtgttttcctctcgaaagggtttgtctttaccaatggaaagacgcccgtcttctgcgctttcatataatttgacagtggctatattgaactgttcttgcaaatcgccagttttggcatcccctacccaacctttttcatgcaattcctttccttgagtgacccaagcgacgaggttatctctaatatatcttgaagttataggtactcttgatttctccttataaactctgttaaaaaactcagctatcatttgatgacataatataggtctccttttacttgctctctttgttgtgtggagcaagagggcccaatatatgactgttaacttttcacaaagacttttttctttattattggaccatcgaaacttccttagttgccttgtttccgcttcgtcattactgtttccccccaagtctgtgggggctccaacgtgcaatatgtcgttgtcaatatcactagaagtatgagtttccacattcaacttggtattagtagtgttaattcttttattaaagcaaatagtatgtgtagattgcaggaggtcgaagctcttcggattggcaaaatcaatattctgctctataattttcacaggttttgttggcagtatttgtgcaattcctgtcattgagtttctaaatacattcttttggtcatattttgaagtgctctttttgcttttatgtactttttttgaagaggacgcattcacatttgttacttccaatttctcttcctccatttttggcgtttcagagggctttccgtaataatcttcaaaggaatttaaagtaaaattcttaaagttggacatccaaaaggatcttcacaatataagcgtttttctgtccaccagcttcaacaagcttcagcctactaccaatttctaatactgttttatcttattacttgcttacttatccactcccattgttttgtcctagatgacagcatcacccggactgaatattaaagcgtcagtgtcacttattttaagtcataatcaagtccttttaatgtggctatagattaaccctgtacactaaagctgtatattatttccttaaaggagcatttattcccaaactgtaacgcagaatgtcattccagaatcatggaaaaaagattcaaataaataaatgtatatacaccaaaaattacaacttcgaatcctatagtacttttaatctttttgaaaaaaatattactaaaaactatgtatcatgtccaaaggccatagggcctagcattttctttgttaaaaaagataaacagtagagaaataaataaaaaacgccctaacccaacatataggacctctttttcgttggcctagtcaactttaatggatgagtagatttttctaacaaagagcatactgctgataaagccaattgaccccgttaccaaacagcagagtaatgaaatgactgaggagtatcccacgtataagacaatagtcgtgaatccacccaacttaaatttggtgaataaaatagaatgaataaacacatacaaagcacaaccggcgcctccaattatgaatcctctccattgccacttccagttctccaggcataaggaatgataagtgatcaaaatagtgacgagtgaacttgtcaaagttaataggaggaaagagaaaaagaggaaaccaaacatgtaaaaaatcttattaaaccataaacttgtgtatatgaaatacaactcaacggcgatggagccaaatggaaagataccagcaatcaaagtagctggtatagtctttaaataccaaggctggaagggtatttgtcttgcgatttggtttgtcttggttggatgttcatcccagtgacatcttttcctggcaatcaatgaaccagcaaatgataatgggattgagaacaaaaaccatagaaaaaccataaaaaacagagtacttgctggtatgacaccagaagaatgaacaaacattaagaaaaagttcaacgcaataattattagcagaatagcaccaggaactagaagtggagtcaatatcaagtttgccttccagtatggcccattgaaaaatttgtagatgcccatagatgtataagagccgacaaacccgaataatgcatataagataaacataacagtggctaaggaacctctagaactaggtgataggaaacccaatgcagcgaagaagatactgcaagttaccatcaaaaataattgaactcctgaaccaaccaaaattgaaagggttagcgattgacttggcgaacgaaaaacatcaccatgattcaatttccaacccgaatcttcttgaaaatcatcgtccaaatttaactcgttgtaacgtgcgaaatcacttttcagtgcgcgcaatagcgaatggataacaacagatgacaataagacaacaactaaggagaaatttatcaaagaaaaccattgaatagaaggatcatatacgtgtaaatatttgtcccacctggtggcccaagaagtcgctgattcattgaatttaacggaataagtaaaataaacttcattatcatttccttcgtctagcatcaatgggctgccagtcgtttcacatgtacctggactggaacgttttatggaaaccggttcgacgataacaccaactacacgatagttaccttcaccacgatcgtgatattcaatcataatatcgaaatggttggcaaagtaaggcaattcgtaagttttcaccatgttacgatcattacgtgtttccaattccacatccttatcggtggtttctgccccttttggagtagcctcaatgtcggttccttgagttacctgtacaaaaccaaggttgaagccagcaccataaaaactagtcttagttctgccatcataaacctctcttgcagccggtaatccatcaataagccagttttggaagaagccattttttatcaatttattgatgaatttagcatcatctcccggaattacggtcttacacagggattcacactctttttcttgtaacatattcaattggaatggtgaattataaattcgatcaccaaatataacggatcccaaggattcaggttgcttttcgactttttcaggctgacaaaaatggaatctattgtaatagtagtcgtatgagtacaagaaattttctttatcgccagaaacgttattaccgtcctcatctttgtgttgataattcattgatggagttaaatgattaacgagcaatgggatgttgtcattttccctgtaagtggtaggcgctacacctggtaaatagaaggctttgactgttgacacaaaaaaatacaacaacaaaagctgtacgtgtgccattttgtaaatcattctgttttgttttcctttcggtacttgctctctgctactaaattaatatctgaaaatataacggtagcagatgaaggaaaagctggacaaggagccaaaaattaacttaactaacgtaccaaaaaaagatacaaataaaaacaacaaagcagttcaaaaaccttgaattacctttttgtttatcattaggcctatttcttcgaaccgatgacatttttcatggcttcaccaagtaaagaaaaattgccgtgaaaaaaatttaaagggctgtaacccggacttttgtattataagttaaaatcactcattctcaggcagtattggtaacattccaagtgacttccaatacgtgttgaatttactactaacattccagtgcaagtagtaatttttattaagttttgatcaacttaggattttcctattttatttttgtttattatattaagtgttcattattttaagtagttatatattatataatacaaccccgattagacaaacttcataagtttttcgggtgggacggtatcaagcatttcattctcatcaattcgcggtttaatgggcttataatcaccctctggatccttaaacacgtaggcaagaatgacgcctgcaataccaaggacagaaactgtccctaatgctagtgcaagaccaattaaaacgacaaaaccacgacctattttcttcttcttcgattttgatttagattcactgcttgccgatgaagatggaggctgggatgatgttgactgaggacttgtcacagtaatgttcacattggcaagtggtgactgagagttgaattcagttgaaacgtctctattaataaaaattattggattgtaattggaagtatttgttgtttctgaaataaaatatggggtccatttttggaaatcaaacaacaaactttgtaggtatccgtattgcgaaatattaaaattaccattaagtaagaggatactgccattattaacattgttgattcctctcttgttcaaagtgttggattcaatatctgtgtatatagctgaaacagagctaatagagctagcattgccaggtaacgaggtaatattccattcttggtttctatagataaataatgaagtatcattccatgccactatggagtcttcagtgacagtaaacgaattcagtttcccttcagaaccactcaataatggaatcatagtagaattggttaagttaaaggatcctaaacgtatagattggtattcttttgtttcaaaaaggcctgagataattaattctgatgagttggtgaaggaaagttgtgtgatttcaccaaaaatcgtgttattgaggaaggtagaccaagttttgctttcataattgtatagacataatccggtgcaattcggctcagtcatttggaaatctccgccgacaagcatactacagtttttttcaaagttaactaaagcatttattctagcatttgatcctagtgtttcattagcaatcatggtcaaatttctcaaatcaaaaatcgacagttctgctgtggttgaagatcctgcactgacagctagtaaagtttgattatcagcgtatagcatttgagtaataccgctagaccaattccaggaaggataaacttcattagaaaaataaattttgtttagagaatccacctcatatgcatatgccgtggcagactcatttaaataagctcccaggtaaggtacaatacccccttctaggttaagtggctctatttcattttcgttcaaaaaacgtacagacccattcaaattaccatattgcatatgagatactgcacctgaaaacaaaacatcgccatcgccattgttaccagccgcccaaagtgatagactaaaggaactggagttccgtataagcgcattggaagatgcattgaccacataatcgttatcaagaacaataaagtcgttatttgcaagacttatattaagggcactattcactgtcctcgattggttgaagacattctcaaatgatccattaaacaaaaaaacagctgattgattatttgatgaaagaatatctccaaatattagtaaaccttggttagttttcgttataccatgtacatcaccttgaatggtttggtttttacttgatgtaacctcaaagtcgtcattaaggtcgacaatggaaatacggttgcttactccaccaattactaatttgttatcgtaaatgtcagcataaagggaagaatttttagggtaattttttactgggaaaagattcaaagtagtattacctacctttgtttcgttcaatctcgtgctggtaaagtttgatttctggtattggagaataccattcaataaagtttcttttttagcgttgctagaatctgaaagtgtgttaaaagcatctaaagaaacagtaatgacattaacttgatctgccacgaccactgttgcagtgttggttgtataaattcctgagacatactccaaaacgatctccggtgagaaatctagatatcccgagtagatttgatcatattttagattatcattattctggtaaatcaagtacgtcttcattattgtgttattttgttgattccacatggtcacgtttacaatacctcttgcggagcacgtattatcctgaagacaccctggtgtatacatgttgatagtgtagtgaccggggtggataatgtttgggtaaaactttacgcgtggaattggctcattttgatctggaacatatttcgcggctatataactttcacctgttagaccattataccaatcattgctcgacaatgtagatgacgacgaatcattggtaagcgcgctgcagccatattcgttgagagaatcattagcataagtggagaatgtgtcctgatagagctccaaaccggataatccaacactaccaccgtatgaatttaatgctacaaattttaacgatgaaacgggaagttcattcacaaacgcaaagtcttggaaatctgacgtccattttacgtctgtcttgttgttatcgatgaaggtaatcatgtccatggatgaagatacattttggcttgctgataataaagtggctcggctatacaaagggcaaaattcaccgcaattcttcaactccccacttagtgggtccagatacgttaaattcattatgctactggatggatcagtcagaatttggaacacggagatttcactatcggaacgttgggaattataaagccttatttttgttggtgaaacttcatatggtaaattacaaactagagacccagacgtatccggataaagccatgcatcctcattagtgttaggacaaactaacgaatcagatgcaaacgttgtacttccctgggaatcccaggaagcgtacctcagtggaattcgttggcctagctccaatgtagtagcgtttaaagaggaagttgagttcgtaccgttatttgaactactgataagcgcagaaggatcatccagtgtataaaactggcctgcaaataaaatgttgtcattatttagcttgactatggaattcacactggagttttcaccaaaccctccaaaaggtaaaagttgggtggtatttgatatggagtcccaaatgagagcactatagcccgtcatggagccattattatatgaaaagtttcctccaaaatagatagaagaattgtctgcgagcacagcctgaacagctcccaaagactggttgaatataggcgtcatagacagtgtcgacaaattgtataatatctggtttccgacagagatattgtttatcgtgcctgatccgctaagaataaacgaatcaacgccaaatggtgtaattttgtctattcgagtatcatcagaggcatcttccaactggatataggtgttgttagagtaataaactaatccatgtgagcttgtttctggacctatttctttagtgaaattttgttggcctgtgtactcgtaaaaagataaggcgtccacacccccgaggatttgtactgcgttgctattattttgcgatatattcaaattcggtagcacattatcttcgatgtccagaagagatttaatattctccaactgtgatgccttcgatatctccacaagaaaaggaaatgcgagtgtccagagacgatgaacaaacatttaatttctatatcgtaacgaagaacaggtgtattttgatcgttttctcttgcgtttcttcgtttcccggtcaatcaactgtataaatataaaacgaaaattgtattatcttctcctacaaagtctagtatggggatgattaaagcgcacactttccttcgagacttctgatgatgacatttccacatttccatatatttctttttttgtatcgcgaaaaaatgggaagaatggcgtttctaaccactaaaaaagaggaatttttgcctaatttgggaatttgtcaataaaaatgtaaaacatatgagatgtattattgcctgcggaagattcttaaaaacatgacaaaatccaaattgaaaatgacctgaaggtctcgacttttcggattttcattgttgctatgtaaatctatagttaattatatccaattctggtaaccaaacctgtgcttcgtacaccaatcgggaccatgctcatagtattcttctcttgtgaccctcgcttttcggtaggaatctgtctttgcaaactgtgacatcacttcccacccaaacagagcacagtcaccttcgggcaccgaaacatgacaagtccaatctgtgggtaattgcctttgtagttctgccgcaagccgttgggcgaaattgggcagattaaagtttcctcctgtacatacaatgtttcctaccataagaggtcgcactatttcgggcaacatggaaaggctctctaggatggcctccacaatgcctggtttagtaatttgcgaaatttctggatggaaaaaagtttctggtattgtgaaaagctcatctgtcagtgttatgatctgcgcatcttcaggtaacggtacattttcttttctggggtttcttacgtaaccaagaaagcttgtttggaagtcaggaagtacatattctagtgcatgcttatccttcgttttgaaactatcaaaataagacaccgggctaacgaacaagcattgttccttgatattgttaacaagtatggtttcatccatcatattgtagtgtctgaatgatagagtttcctttagtagcccagttaggaaacggcctccaatgtccaatttttttaccgctttatagtacggtattcccttcaggacaggaattatccaagtacaattaaacccggaatcaataactaattggaaatcatgataatcgctacctgaatcctgcgcattcttggactcgcttgatgtggaatttgtactgtctgagttgccacggacaatatcgatatcttcgtccttacctgaaattgttctcatttcacccttatatgacttggtaaatggtacaaagactgctacaggagacttgaaaagactgtcgaattcatattcttcaaatatcacctggtcggcatgcttacttaattctggtaaagtcatacagctctcgctagcaaccaaatgatgaccctttccctctttcagatcaaacccatcaaactctgaaggattgaaaaggcaataatcccatatacaactctctaattcccataatgtgagctgtcctagttcatgtggcctcctgaaggtgatagatgaaatatctttgatgtttttgatatgatttgataaatacgatgtcccaaatttatctttggccaatgcatttaaagctcggaacggtttcttattcgtggaaggaccaaacttgatttcgtatgagccattatcaatcacaatgggtggtgtttccatagtttaaattatcttgtccacgattctgcgcttcttctcctttggtcttgcattaattctcttgttcttcttggcccattttgaaatgcatttgtaattatggacggaaagtaaactgtttacaataatcacgaaaatacatataggtttacattatctacacactggaatcgatttcataccataaaagaggccctataagaagccgcatcaccttaaacactaaccacgtgcaaccaacagaatatatttgatgtctgatagtccattgagcaaaagacaaaagcggaagtccgcccaagaaccagaattatctcttgatcaaggtgatgccgaagaagattcgcaggtagaaaaccgagttaacctaagcgagaatacaccagagccggatcttcctgcgttggaagcatcttattccaaatcttatactcccagaaagcttgttttaagttctggggaaaatcggtatgccttttctcaacctacaaactcaacaaccacgtcattacatgtaccgaacttgcaaccaccaaaaacctcttctaggggtcgcgaccataagtcctactctcaatcaccaccaaggtctccaggaagatcgccaactagaagattagaattgctccagctttcgccagtgaaaaatagcagggttgaactacaaaaaatttatgataggcaccagtcgtcgagcaagcaacagagcagactatttattaacgaactagtcttagagaacttcaagtcctacgctggtaaacaagtagtaggaccctttcatactagcttctcggccgtggtaggccccaatggttcaggtaaatcaaatgtcatcgattccatgttatttgtatttggatttagagcgaacaagatgagacaggacagattgtcggatttaattcataaatcagaagctttcccaagtttgcaatcatgttccgtagctgtacattttcagtacgttattgatgaatcttcgggtacttcccgaatcgatgaagaaaaacctggattgatcattacaaggaaagcctttaaaaacaactcatcgaaatattacataaacgaaaaagaaagtagctacacagaggtgacaaagcttttaaagaatgagggtattgatttagaccataaacgatttttaattctacaaggtgaagtagagaatattgctcaaatgaagcctaaagcagaaaaagagagtgacgacggactactggaatatctggaggacataattggaactgcaaactataagccgttaattgaagagcgaatgggacagattgagaatctaaatgaagtttgcctggaaaaggaaaatagatttgaaattgttgatagagaaaaaaactctttagagtcagggaaagaaacggcgttagagtttttagagaaggaaaagcagctgacgcttttaagatcaaaattatttcaatttaaattgttgcaaagcaactctaaacttgccagcaccttggaaaagatctcctcttcgaataaagacctcgaagatgagaagatgaaatttcaagaatctttgaaaaaagtggatgagattaaagcacaacgtaaggaaataaaagatcgaatatcatcttgtagctcgaaagaaaagaccctggttttagaaagaagagaattagaaggcaccagggtgtctctagaagagagaacaaaaaatttggtaagtaaaatggaaaaagcagaaaagactttgaaatccaccaaacattcaatatcggaggccgagaatatgcttgaagagcttcgtggacaacaaaccgaacacgagacggagatcaaagacttgactcaattgctggaaaaggaacgaagtatacttgatgatattaaactatctttgaaagataaaacgaagaatatatctgcagagattattcggcatgaaaaggaactggagccttgggacctccaacttcaggaaaaagaatcacagatacaattggctgaatccgaactatctttgttggaggaaactcaagctaaactgaaaaaaaacgttgaaactttagaagaaaaaattcttgccaagaaaacacacaagcaggagctacaagatcttatcctcgatctgaaaaagaagctgaactcacttaaagatgaaaggtcgcaaggtgaaaagaattttacttctgctcatctaaagttaaaagaaatgcaaaaggttttgaacgcgcatcgccagcgtgcaatggaagctagatcctctttatcaaaagctcagaataaaagtaaggttttaacagctttatcgagactgcaaaagtcaggacgtataaatggtttccatggacgtttgggcgatttgggcgttatcgacgatagttttgacgttgctatttctactgcttgtccgagactagatgatgtcgtggttgatactgtagaatgtgcgcaacactgcatcgactacttaagaaaaaacaaacttggttatgcaaggtttattctcttggataggttacgccaattcaatttacaacctatcagtacaccagaaaatgtaccgagactatttgatttagttaaacctaaaaacccaaaattctcaaatgcattttacagtgttcttagagacactttggttgctcagaatttaaaacaagccaataatgtagcatatgggaagaaaagatttagagttgtcactgtggatgggaaattaattgatatttctggtacaatgagtggtggtggcaaccatgtagcaaaaggtctaatgaaattaggtacgaatcagtcagacaaggttgatgattacacccccgaggaagtagataaaattgagcgtgagctatctgaaagagaaaataacttccgcgtggcaagcgatacggtccacgagatggaggaagaactgaaaaaattgagggaccacgaaccagacttggaatcacaaatatcaaaggcagaaatggaagctgattccttggcgagtgaattgacactggcagaacaacaagtgaaagaggcagaaatggcgtacgtcaaggcagttagtgacaaagcgcaactaaacgtggtgatgaagaatttggaacgcttgagaggcgaatacaatgatttgcaatccgaaacaaaaactaaaaaggaaaagatcaaaggcttgcaagacgaaatcatgaaaattggtggtatcaaattgcaaatgcaaaattcaaaagttgaatcagtttgtcagaaattggatattctagtggccaaacttaaaaaagtcaaatctgcctcaaagaagtcaggaggagatgtcgtaaagtttcaaaaactgctccaaaactctgaaagagacgtagaactatcatcagatgagttaaaagtcatcgaagaacaactaaaacatacaaaactggctttggcagaaaatgacacaaatatgaatgagacgctcaacttgaaagttgaattaaaagaacagagcgaacaactgaaggaacaaatggaggacatggaggaaagcatcaatgaatttaaatctatagaaatcgaaatgaagaacaagctggaaaaattgaactcactgttgacgtacatcaaaagtgagataacgcagcaagaaaaaggattaaacgaactatcaattagggatgtaacccacaccctgggaatgttagacgataataaaatggactcagtgaaagaggatgttaaaaacaatcaagaacttgatcaggaataccggtcctgtgaaactcaagatgagagtgaaataaaagacgctgagacttcttgtgacaattatcatcctatgaacattgatgagacttcagatgaggtatccagagggataccaagactttctgaggacgaattaagggagttggacgtagaactgattgaaagtaaaataaatgaattgtcatattatgtcgaagagactaacgtggatattggagttttggaagagtacgctaggcgcttagcagagttcaaaagaaggaagctggatttaaataatgctgttcaaaaaagagatgaagttaaggaacaattaggaatacttaaaaagaaaagatttgatgaatttatggctggctttaatatcatatcaatgaccctaaaagaaatgtaccaaatgattactatgggtggaaatgctgaattagaacttgtggatagtctagatcctttttctgaaggagttacgtttagtgttatgcctcctaaaaagagttggagaaatataacaaacctttcaggtggtgagaaaacactaagctccttggctttggtttttgctttacataagtataaaccaacccccctttatgtcatggatgaaatagatgccgctctggatttcagaaatgtctcaatcgtagctaactatatcaaagaaagaaccaagaatgcacagtttattgttatttcgctgagaaataacatgttcgaattagcacaacagttagttggtgtttataaaagagataatagaaccaaaagtaccacgattaaaaacatagatatcttaaacagaacttagctagtacaataatcaattcaagagcacttgctgattgtaatatcatgctatcaaagaagtttaaagatactacccaaattcccgcctgtttatttcttcttttgggcagcagttaggaaataaaaaaaaaaaaggtcaatgataatgcaccaaaaacagaaagtacatgtatatcttaacaaactctcaaaatacaatttaaacaaagttttttgaagcaaaattcgaatgcaagattcataaatatggggcgtaggaaatctatactatatgcaaatatcacgtagttaaaaaactataaaacataaaccagaaatatggtatcaaggacttttgaatataattaggaacgagattaatgcgtatcatctagtatcttgacatactgcttttctgcaagataaacaagcttttggacggggataactgcggtttggtgagtgaatttcggaaatttttttctattgacaccaaaccattccataggtggagtggcgtctcccagatctcttatctgaggcacttcgatctgcggttcttctagtgcaatataattaaactttgaagcggcttcttcctttttaattgattcttcaagttcttcctcagtttgtccaaaggaaatatttgctacctgggatcgacgaactgccagtgctttgacatgtgtagtccacatttcctttatgaagtctacaggccctagattccaccttacagatattttgtctgaaaaagagcaagcaaatagatattctaaattatttgtcttttcttcttgtaaagttgtcatatgaacagcaagttttggaatatcaatgatagtaccaccgacaatcttggaagcataatgcatgtaatcatcaatagcaatggaagctccaacttcctcatctaattcttctttggaagtagaaagcgctgcagaaacatctaaaacttgtagttgcaaatctgtctttaattttttccccgaatgtgtttcggaacgtatagagactttgtcaattcttattactaacacttccacatcgaataaagatattggcgaaatctggacctttgaagaggagatattcaccgagagatcagttctgagtaatttcagcgatcttaaaatgtctttgtataatattggttgcctagattcaccaggattggaatctctcaacgtctccatatacgatattttattatcctgcctcatacgtacaatggtgttgtagatatccagtatatttgctacaactaatgcagtagagctgaggataatttcatctgatgaaaaagagacctgcagcaaatcaggtagaacccccttggcatccttttcattatgaagatggaagtgtatgttacttatagtgccgattaagaacatatgataatcaaaagcagcctttaccgctatatcatcaatattcagggaggtggaaactaatggatgagtatttttgcttttttcaggtggccattttacttctgataaccaacttgcattcgcaacttcaaataaaccactcagtctaccttctgatgtcaagctaataccgtcagtgaaagcatgcagtaactgccgcttctcgttataatgatctgtggccagccatgttctttgtgtccttaatgaaatcataccgagagaaggacccaaatcaacgtctccgctaacatttgtaaaaattaatgtaaagcaccagggtatttccgtacctgcatcggcatagttggttgatgttaatgaactcatttcaatttccttattaacagttctttgcactggccgtgtgtgtaaaatgctactgaacctccatatgtccaagaataaatacaggttctggagctgctttacattgaagaagacgcttagatcagaaaccaaccccgttccatacatactgattacatcaggatgtgtaaataaaagcgtcaagtccatgaaaccaacttcaaaggacgtacttacttctcttgaaaatatgtgcttaatggacgcttttgtgtgttctagagttaaagaaaactccaaaggctgttcagagtcgaactcattggtagccatactgaacaaaaacgattcaaatccaacatctgcctgaaccttagcttttggttcacagctcaaacttagctgttgcttggctgatgttagttttacagccacatcaaattgatccaaaagtcgcttataatcaacattctgtgaagaaggttttgtaaagtttggtttttcgtcggtgctatgtttctttatcatcttttgcagactttcagaaaattccattaataaaggagcacatcccgcatacaaagtattatgcgttgggtcgacagtgattaatgttctgaatttatgtggcttaactttatcttcatcatgtttatatgtacagtttatagtgactactggactttttatttcaaaagatggctcactcttggtttcaatatcttcgtacgtgtaaaccctaaatacaccaccgtcatacttgaaatttgagttaacagatctaatgttatcgagaaagggagccaaactactcgaagcactttcgacactggtactagcataagaattatcattttccgcacgcaaactctcggacacatccagaatgttctttttcagctcttgaaatgctcgcatggattgtaaagtagactcaatgacatccatgaatgacgggacaaagtttacatccagtgcttcaccatgaaatctaaaaaaccaatctttcaactcaccacatcttttgaaccagtaggatatttgcatgtttggcaagaaacttctattatatttgtctttctcgtttccttcagagaaaaaagtgcttgaggtattaccattcgcaacagagaaaaaagcgtccacaactgtgaatttcccaaaatccttttcatatgctgaaaacaatctgttataacctaacattaacccaggattggagcctgctccatactggaatatccacccaatacaaaatttataggacaggatgtgtattgaacggaaatttatgggcatttcttttgacttatcacttttaccggtgaacatcttagtgttccaaatattaggggcatggcgtcttgaatagtaatggctcaagtctagcaatttatgcgcgccccacattaatcttaatagagaatcaggagataagcagaccctgaaatgagaactttccacttggaatgactgctccgtatcaaccgttctttgtagggttgatacttttatggaaaagtcgagtaatttggaaagaccaatgggtagtgaccgctcctttattagaaataggatgttttcgatggaaaactgtcccgtcaccttggtttcttctggtaacataccgttattcgtattggtcagagaaagtagcagcatatgtaattcaaacacgaaatacgtggaagccactggcacaagaacaccaaaataagtaatgctagtatctaatgtccaatttatcattatcgagggtgcctgcttctctttttttggtagatttgaactaaagaataaaggcttcagggaatataacagattgataccctgagaagcaagcttttcatcttgtaaaaaactgtttacaatacggcgcggctccgaaaaggttaacttaatcatagatattgagatgtcaacgtttatcaacgaatagccttctctagaaattcctcctttaatttcaatatcgccaaatgaaaaccttaggtattgctcctttgtctggtgcgatgtcatgaaaaaatcagtatcccatatgcttaacaaaatctcatttgaaccgaatttgttaaaatatatatcaagctgcttggcttcgtgacgaatataaaatggcgagagcggcataacttcagaactaacgtttgaaaaataacatgacaagactgtattaattttctggtcgacaaattgggactttttctttgatttaggtttaaactttatgcgctctttaatcatcatcagactttccctaatttcagtaatagcggttactaattgctcagttgaactcattgctctaaaatgaagatctgcgcactggttgtttatcagaatcgtaggcttgtgtgaccatgcctcagtagtcgctaaaactgaaaagtcgcgcagttgagcttctcccaaaatgacagatgtgtgttttaaccacacttccgatttctgggaaaatataaccaatgaacccgcttgactagttgaatcttttagattttcccatagtaaactaactctacccccaactgttctactcatcagcttcgtttggtccatgaccagttgcagttcacttttatccactaataaaacggtgttcattttgaattgctttgataactccttttttggatcacttttgtcatcttcgcccactgctgcaatgagtggaataagatcttgcaatttaagtaacctatcactgaattttccttttactgagcctactcttcccgtaatttcaatagtttcttctcgatttgaaggtaagcttgtcaccggaggcgtcaaatccactaccagattggcatccgcaacaacaaaattatgctcaacctcatatccctcaccataaacagtaaggtaaaatgatcccatggtacacttcaacaattttttaatcaaattttgtttatgtttctcattttctgccgtgaataatttgccgtatatatacgaccttgcaacatctgagaactcccaatttctccaagtcgaaaacacagacatgaagatattttttgcatctttagcagaggtatatttcttttcttttagcacttcgtcgatgttgctttgccaatcatcaggaaggtacgttaaaatgtgtctcagacgcgtaataattttccaactacgattctcacgcacatgccctttggaaagtctcataataaaagcaggttttgttatgacgtaaggatcatgactaatttgataatattcgcttgcggctgtgagctttgaaatgagttctgtctttgaattacttctggtgttctgaatagaattaaaagaagtgcaaacctcttgaataagatttccctggtcactacagtactcaaacagccattccatttgagattcgtctatggtaatatctgatgacgttaagtttaatgagttaacttgtctatcttctgtagaagaccatacttcgaaaccctcaatccctagcgacagtgcagggggacgatcttcagacaagtctggatttttcttctggttaacagtcactctgacagtttttacctttgctaaagctgctacttctaataatttatttgttcggttcttctctagagacttttcactcatttgataatcaatacgatctaaatagagctcaaaaccttcctcacctgtctcttgccagattaaatttagataagcaatatggatatcaatgtttgaaatagaagtgatcccttcttgaaggttgcttaatcgtttcacaatcccaatttcaatatcgtctaagacttgtaccatgttttcagagtaaagctgttctaataaactcttagcgaaaataaaaagcaacgggtcgacatccaacagaatatatgaaacatcaacaacatagttatccctttcgtggtttctgtcttctgtaaaagcgacaggtttgaagcttgaagggtccgcttcttcgtcattatcatcttcactgaagctggctcttgaaggctccatagttgatggagtttctgcgaatatgttcttgaatggatttgtggtctccagaagggtagcatactcgcccacaatatcttcaatgatataatctatagtatcaggcaaagtgggaagaggtaaagttgggatagacgaagatggtgctatagccccgtacaggttttggtatgtatccgaatcctgatagaacagcggaagaagaaaaggacacctatgatagggtgaatcgtgtattgttatatatctgcgttgttctgatctttttttatcgatatccttgtattgctcaaagtttgtaaatcttaattttgtttcgaatttgagaaatgatgtgtctacgccatcgcccatcacgcaatttaacgaaattgtcaattttggaattttcacgtctattctttgtgaatatttttcgttttcaaagtcgatcaaagtaaacaatatcgattcagcactaataactgattgagatttcatcaccggatctttaaggcctattcttattttttcaacgtgcacggttagcgaggtcatatcattaatggtctcagtgtcatataataatatattttccaagtcattgtagccaaaacctatcttataaaaggaattaaagaatccctttataaattcaatatctgaatcaatgcataaatctccgagattgatatcccattgacaaaagtaggtaggttctgtgggtggtaatccatacattctatgtccatgaatggtgaggtccgaaagcaatccgtgctcttgctcatcagctccgttattacgacgtataaaatcaaatacttcatttatttgttttgaaacgtgccgctttattgaagtcccgttgagaaccgccattatgtccatataataattacaacttctgaaatccactacaagttcggcaaaatgtagtgcaatgcatggatcaaaactgtaaatcgtttctggtaatatcagagcaccatcccaaaccgaaaatgtgaaccaaatatcagtttcgttggtagtccttttcaaatctgaccttttcataggacctttatcctcagattcgttctttagactgctattttggtaccctgaatctacagtagatgccaaatctgccaccgagcttttcgtagtgacatctccgacttccctagcgccaaggacacctgtgtactcttctgacgtcacaaaattaaaaaattcaccgaagtaattcatctttacgtttgttaaatacctcatgacaaacccatagcagtgaagtactgtactcttgctgttacactctatgactagcgtatcgacattatcaatatctaactcggaatagagaaggtaagaacctttaattgtaaagtcgtatgctctccccacttctttatgtttcatgaattcgttcaatgtattccaagggggggtatttaacatcattctgaacattggagttgagatctcgtaggacatatctgtgtatgtccccaaaatactctcacggggtaccgtgacatcaattgaaagcttatcaccatgaagggataaataacagttttcgttaaaatctaacggattgttaacaatattgtgatcattgacgtttaagtaaatggaatatccttccatttcccaattgactttgtatacgaatggtctaaaaagttcgtaaggcgtaggatcaccagcggaaaagtctgaaagcgtatctgcaactaaagttatatgctcacgtagcagaaacgcctctaattgttctgacttcatgttaattatccatatagctttgctattccaacccaatggatatccaatatccccatcaatatcgaataccttgctttttaacaaaatatcgtgattaacacttgacctaatttcggtttccaggaaatgaacatggaaattattctgaaaaccttgcactgtaggacaaacacttatattgaaatttgcataggtgtccttacaaaatcggagatccatccatccaaatggcctatattcttcattagtttctttgtagtgtttcaaaaattcggggtctttgctactttccctcgtcggtatacgccaagtagtatcttccattattgatatattcatcctgaaaagtgtatatattcttctagaacctggcgggagtttttttataggtttggctgtccttgaaactaccggtgatagaactctttgtagatgactgacttgtctttgagcccaaggtccgtaacagatggatcctccgtgaatttgaacatctaaagcaaaatctggaggtgctccgttattgcccacatctggtccatcaatatcaggtattgtcggatgtgcaccatgtggcacaacgcccggaacatccacgtcatatgcaattgtgacctttgggcattttaaaattgatgtaaatttagcatattcatggttcgtcaaatcgaactcaacatcatctaaatcacttgctttagcgtcgcccgcagaagccttataaagagataaacctttccatttatgatagaaattgtcatctgatgtgcctgcgctttttttagtctttttcggtacaacaggcttggttactatctgaaagactcgtacaaacgttttccataactttgacactttccctctatctattttaaacttcaatccaatagcatcatcgtaaccaatattttgtttgatagaaatttcgaagtttttgaattccatctgtgttttatttctgtataaatctaatcgctcttttggaggtaaaacatctattatgccttttccactttcataacttagaatcataacagatggcgtgaatttgtttcctaacagtagggaaccgcggctaaatttaagctcaattggtaaaaacatcagtagctttggatgtttgccgatatctgtttcttggtagtccctgtcattaacaattgatgcatcagagttcgttgtgtatgcagattcgcttagatcttcatctaatttatcagcactacttccatcgctaaaaggttcaggaaaagaatgctcattaaggtatttttcaaatttatcgcgttcatcttttgatagtaagtttataacattatcgtacgccactgttctgttgtaaataaaaatttctagaccttcacattctacggaaattttacagggaagctttgcttttttgccagaagaagacttgttattctctatcaattctgcttttctgcaatttaaaagccagtatttccatgttaaactaccctctaataccgaaattgtataatctttgtgtattacggaaaggtttttaaaatgtattcgaccacctagtaaggagacacgaagtgtctcaacatttatcttgattttcgctcgtttccatagtagccattctaatataaaacttacaaggtatgcatagattcttcccatgtagaatatcattgtcaaacatactactaccgtgagaatccaatctactaaaaagacccagctaaagtccttttggtgtgtcaatggaacaccacgtaattgtgaaatagcttccatgcttgctaacttattaccgtcaatagaagacttgagtcaggtggctttaatgagtactattctttttttttttccaaagagcactatgttgataataccgcagtaattttttttgagtatcctgtagcctagaaaggttgaagcttataaaaccgtgccaacagctttatagtggggagtttggcttccctctatttgtatattgatcgccatccctacgaagttattgggaacgcatcgtgaacctctcactttaatgccagcggtagaaaaaaaagtcataaacaatacacgccggctacacttagaaagaaatgacatttgctgtcttataaaaggacttgacagaccaaagacgcgtataatacaccaagaatggccttattggagaagttgcatcgaaggattgttgatatggggcttgtcccgcgtataatcgccttattaccagttatttccatgctatgcgctctatttgggtttatttctatagctattctgcctatggatggacagtacagaagaacatacatttctgagaatgcattgatgccttcacaagcgtatagttactttagagaatctgaatggaacattttgaggggctatcgatctcaaattaaagaaatggtaaacatgacttctatggaaagaaacaatttgatgggttcttggttacaagaatttggtactaagactgctatttacgaaaatgaacaatatggagaaacattgtacggtgtaatgcacgctcctaggggtgatggaacagaagcgatggtgcttgccgttccatggtttaattcagatgatgaattcaatattggcggcgcagctttgggtgtatctttagcaagatttttctcacgttggccagtatggtccaagaatataattgttgtcttcagcgaaaatcctcgtgcagcattaagatcatgggttgaggcataccatacttccttagatttgactggtggttccattgaagctgctgttgtgttggattattcgagtacggaagatttcttcgagtatgtagaaatctcatacgacggtctgaatggtgagctgcccaatttggatcttgtcaacatcgctatatccattacggaacatgaaggtatgaaagtttctttgcacggtctacccagtgatcagttaactaataataatttctggtcaagattaaaaatattatgcctgggaataagggattgggcgttgtccggtgttaaaaagccccatggtaacgaggcatttagcggctggaggattcaatctgtaacattgaaagcacatggaaacagtggtcatgatattactacatttggacgtatacccgaagcaatgtttcgctctattaataaccttttggaaaaatttcaccaatcgttcttcttttatttgttattagcaccacgtcagttcgtatccattagtagttatttgccaagcgctgtggctttatctatagcattcgccataagttcattaaatgcatttataaacaatgcttatgcaaatatatccttattttccgagtataatttggtagcgttgttggtttggttcgtgtcattggtgatatcatttgttgtttcacaagcgtttcttctaataccttcatcgggattattgatgacaattagcatggcatcttgttttttacctttgatactttccagaaaaattcacatctcagaaccactatcatacaggttgaaaaatgttgcttttttatatttcagtttggtttcaacatctttgctaatgataaactttgcaatggctttactgatcggcacattggcatttcctatgacatttgtgaagaccattgttgaaagttctagcgaacatgaggtgacaactcaatcctctaacccaataaaaactgagccgaaagatgagatagagctcgtcgagaatcacatggatacaacgccagcaaccccccaacaacagaaacaaaaactaaaaaatttagtactattaattttgacaaatccatttatttcaataaccttattcggactattttttgatgatgaatttcatggatttgatataataaacaaactggtttcagcatggttggatttgaaatgttggagttggtttgtactttgtataggttggcttccatgttggctattgatattagcgtcatcgtttgaatctaaatctgtcgtagtaaggtcgaaagaaaagcaaagttaggtgccattggtaagaagtaaaggattaacgggtgttcgaactacgcaattgattttatacgcacaaacattacaaatcgaagcaaaagaagatgaaatgatatgatatactgatacaaatatgtattaaataaaacataagtattgatggaaacatggcatagagaagcgaagatgcgataatatcaaataactatatgtgagttgtggaagaaagaaacgatcacattattataataaactagctatttaaatgtttattgaagactgttctgcccccttttattcagtcacggtattggtcaaaaaattctttatggaaactttcccatttcttaatccattccagaccaggtgccaaaaatgttgttcttaaatggtaagtaccaggttcttgaccaaacccagaaccgggaacagtgcaaatgccagtagattctaacaacttcttacaataaaattcatccggagttaactctaagtggcgagcttcttgaactgccttgaaaggtaagtctatcttagggaataaatacatggcaccttgaggcttttgacattcaatgccttctaaagagttaaatgtctcatacagtgtcattgctcttgtaattaacttttcatggatggagttacgttctgcttggtccgactcgaatgattcctccccttccactggtggacgaaccatcaaatcaaccaaagcttgacctgtgacaacgggacacaatgaaatcgaggctagtttcaagataacttgtctcatctcatggctgaatccagtgagttccatgtagccacccctttgaccacattcaccagaaacacccttagaagtcgaatgcaaagaagctagctgaacattatcgaatttacctggatgttccctctgtaaatgtctcaaaattttcttcatagaatggaacttggtgcccgggaagatattttcttgataaacttcgtcagctatcactactgtaccgtacttggctgcgacttcaaaaatctgagctatagactcaggtgataggacagctcctgtaggattacctggattgataaccactagaactgtaggtttgatttcgttctgtatagcctctttgacgacagtttcaatttcttctggattagttgaccaacctgaattctcatctaaatagtatggtaaagcttgagaattgttcaaagctagagtagcggtatataatggatattgaggaattggaatcaagacacccgtttctggccctctacagaaaattgataacaagtaattgacagctgcggatgcaccagcagttaggaaaatatcctctgggtatgatatctcgccttcgtccctcttcgttataaattcagcgacacttttccttataccttctacaccttgagaagaagagtaagcaccaacagaaccaccgatatcttccattaaactctttgcacgtttaatggcatctagtttaaacaatttcgaatcaactagctgctgttcgttttggtttaatagttctgggtattgtaagagagacaagacctgtctgtagtaagtcagaggtttctgttgtagttgctgaggattaccaatattggcgttgataatcctgtcaaatggcagagattgaggatccttctccagttgagctttcaattcttcagctctcattgggatggcacctctaacggcgtacttagccttcaagacattttcatttacgtcttccaaagtcaattgttcggcgggataaaactcgttattcgaagttttcaacgtgtggtgtggaaagcgattcaaatgacgcaggtcgtttagcgaagattgaccagataatgaacgtctatgattttgagcaacaatccaggaagagctatgtctctgtaggacgggtctaactttcctgaaagcttttaactttgtactactggctgaggtagaaaaaggagtagtgatatgtggcattttttctgcgcttgaagtgagagtccttatatgatatgacttaataacgtgagttatagaattactcactgtgaagtgatttttggcagacagtgataacatcgtggagagagcaaaataaagactggggaaatatatttatatgcgttcaattgagaagcagaaacaattaaatgcgggggagaaacaaagaagctggtcctgttctcgagcaacgtgtgactagtatgaacaactagagtaaaatagcgagaaagcagtagtagtaacggaagagcttttcctagtatggtccgcgggtcacgatcgtttacaaagggcgcagcaaactctaaatacgtcaaccacagcaggtcagaagagtacgtgaagttgtctcaacgaaaggtcgaaaatcgttaggcttggaccccttcagaatgaaaaaaaaaaaagacgcaagagtgaaaaaaaaaccagtactgtaaaagcagaaaacgtctaatgggaagtgctactatgtaagattatatcatgaatgtgctgtgtattatatatggattatatagccacgaatatgcggtaaataaacatatgcatatatgtgtgtggggcagcgctctgctgtgcaatccttgtttctttgtttcttgggtcgggatttgagtagcgacgagccatcctctgcagaagggaagaagaaagaaaggcagagaggcaaagaaagagtcaggcttatcttatcttaagagatatgccgcttggacccaaaagaaagggaaaagtaagtacgcaggtgtagttttgaatgagtggcagtgatagaggagaccggttatacgatgtgttgggggtgacgagagatgcgaccgtgcaagagattaaaactgcttacagaaagcttgccctgaaacatcatccggacaagtatgtggatcaagactcaaaggaggtaaatgaaatcaaattcaaagagatcactgccgcttacgagatcttgagcgatccggagaagaaatcacattacgacttgtatggtgatgataatggtgccgctagcagcggtggcgctaatggctttggagatgaagattttatgaacttctttaacaatttcttcaataatggaagtcacgatggaaataatttccctggcgagtatgatgcgtacgaagagggcaactctacaagctctaaggatatcgatatcgatatatctcttactttgaaggatttgtacatgggcaagaagctgaagtttgatttaaagagacaggtcatctgtataaagtgccacggttctggctggaaaccaaagaggaaaattcacgttacacacgatgtggaatgtgaatcatgcgctggaaagggttcaaaggaacgtctgaagaggtttggtcccggtttggtagcttcgcaatgggtggtctgtgagaaatgtaatggtaaggggaagtacactaaaagacccaagaatccaaagaacttttgccccgattgcgcaggcttggggctcctgtcaaagaaggaaatcatcacagtgaacgtggctccgggacaccactttaacgacgtaattacagtcaaggggatggcggacgaggaaatcgataagaccacatgtggtgatttaaagttccatctcactgaaaaacaagaaaacttggagcagaagcaaatctttttgaagaactttgacgacggcgccggggaagatttgtatacaagcattaccatatcgttaagcgaggccttgacgggatttgagaaatttttgacaaaaaccttcgacgacaggttactaacattgagcgttaaacctggcagagtagtaagacctggtgacaccatcaaaatcgccaatgaaggttggcccattttagataaccctcatggccggtgcggcgatctgtatgttttcgttcatattgaatttccaccagataactggttcaatgaaaaatcagaactactagcaataaaaacgaatctgccgtcatcttcatcttgtgcctcacatgcgactgtaaatactgaagatgacagcaacctgactaacaacgaaactatatcaaatttccggatcattcacacggacgatcttccagaagggataaggccgttcaagccagaagcacaggattcagcgcatcagaaagcaagaagttcgtactgctgtatccaatgatggcatcaataactttttattctatttttttttttttttcataagttatcctacctgtatatatgtatatatatgaaattcatttactgaatgcggtgaagaatgaagtctttcgcaccttcagtagaaaaataggaagaatccccatcgcggcggacataaagcaagcatacaaaggccttctatcagaacagcgattgcgaacttggagcaacaatggcgtcccaggttaacgccttattactgccggtcatagagtctacgccgcttcatcaaataaccaaggtagcattgacgaccacactcacaagtaaacaaagcgattacaagttcaaagaaatagccgtgccgttaacaaaatcactacaactgtacgagaaggcgcaaagaagacaagatttaagggcaagcttaaaagcactggagagtatcatttaccaaacgcacttccaatggaataacccgctcccacgacatgcgcatctcttccaaaaacactaccactttctactgactcactggccatttgagaaccacagagacttggtagattccatcgctgtaaacaatgggaaactaaattcaacgtcttcaaggagcgtctggctgaaggcggattggataacactgtttaacgttaaaaacccttgggtccaaacgccgccatcgttaatgcgtctgagtgggacagatcttgataccttcacaccagagaggatattcctgataaattctcttggaaaccactacaaatttttaatagcgaacagtcatctaagctacaatcacaaaaaatacccctcccctggcgtgcaaattcctgtcaggaacgctcttggcgaagtttctccggccaaacaaattgcccaacttttcgcaagacagctgtctcatatttacaagagcctcttcatagaaaaccccccgctctctcctgagaacgagctggcattgactgccgtcttctatgacgagactgtagagcgacgccttagaaggctctatatgcgagcttgtgcaagggcatatacgactactaatgccgactccaccacggagcctttgatgtttcattgcacccggtgggaagttgattagttgttgttggctgttatactggagtaaatgtcacgtgccactgtggccgtgtcaggtcacgtgaagagagaaattcggccacagttgtggtcctaaacaaggactgaaaaagatcgcagaaactagcaacgtcggatagcggtatggttgaaccaaagtccagtttttagtcatagccggttgagggatgatctgccgttcagtgttctgcgttcaataatacgcatatatatatatatcaaggtatcaacacaatacttgaacaggttaggctcgtactaaagcctggaagtttttatctttctgtaacatttttctttcttgaggtgtgtgtgtgtatagattagcagggaattatctaagatatgtccagggaaggttatccaaactttgaagaggtagaaattcctgactttcaggaaactaacaacaccgttccagatcttgatgatttagaattagagtatgaccaatataaaaataatgaaaataatgacacgtttaatgataaggacttagagagcaattctgtagcaaagcacaacgcagtgaacagctcaaagggcgtaaaaggctcgaagattgactactttaatccttcagatgtctcgttgtatgacaattccgtttcccaatttgaagaaacaacggtatcgctaaaagagtactatgaccacagtatacgatctcatctcacggtgaaaggagcatgtagttatcttaagagtgtttttcccatcatcaactggctaccacattacaattttagctggtttactgcggatcttattgcaggaattaccattggctgtgttctcgtgccgcaatccatgtcatatgcacaagtcgccacgctaccagcgcagtatgggttgtactcctcgtttattggtgcttactcctactcttttttcgctacatcaaaagatgtttgtattgggcccgtggctgtcatgtctttgcagaccgccaaagtcattgcggatgtcacggcaaaatatcctgatggagattctgccataactggtcccgttattgcaacgactctagcgttactatgtggtatcatttcggcagcagttggcttcttgcgtctagggtttcttgtcgaactgatttccttaaatgcagtcgctggatttatgactggatccgcgtttaatatcttatggggtcaagttccagcactaatgggttacaatagtttggttaacacgagagctgccacctataaagtggtcatagagaccttgaaacatttaccagataccaaactggacgcagtttttgggctaatcccgcttttccttctttatgtttggaaatggtggtgcggaacatatggaccaaggttgaacgatagatacaactccaaaaacccaaggttacacaaaattatcaaatggacatatttttacgctcaggcttccagaaatggtatcattattattgtattcacttgtattggttgggcaatcacaagaggcaaatctaaatcggagaggcccatcagcatcctaggctcagttccatccggtttgaaagaagtcggggttttccatgttccaccaggattaatgtctaagcttggtccaaatttgcctgcatccattattgtgttattgttggagcatatcgctatttcgaagtcttttggtagaatcaacgactataaagtcgtccccgaccaagaattgattgctattggtgtctcgaaccttttaggtactttcttcaatgcttacccagcgactggttccttttcaaggtctgctttgaaggctaaatgtaatgtccgtacgccgttatctggtttgttttcgggttcatgtgttcttttagcattatattgtttgaccggcgcattcttttacattccaaaggctaccttatctgcagttatcattcacgctgtatctgatcttttggcctcttatcaaactacctggaatttctggaagatgaatccattggacttcatctgtttcattgtcaccgtcctaataacggtatttgcctctattgaagatggtatttattttgccatgtgctggtcatgtgcaatgctcattttaaaagtggctttcccagcgggaaaattcttgggtcgtgtggaagtcgctgaagttactgatgcttacgtcagaccggactccgatgtggttagctacgtgtctgaaaataacaatggtatttccactttagaagatggtggtgaggatgacaaggaaagttccaccaaatacgtcacaaattcctccaagaaaatagaaacaaacgttcaaacaaagggctttgattctccatcttcttcgattagccagccaaggataaaataccatactaaatggataccgtttgatcataaatacacaagagaattgaacccggacgttcagattctccccccaccagacggtgttcttgtttataggctatcagagagctacacctatctcaactgttccagacactacaacatcataaccgaagaagttaaaaaagttaccagacgtggtcaattaattcgccacagaaaaaaatctgaccgtccatggaatgatcctggtccatgggaagcacctgctttcttaaagaatttgaaattctggaagaaaagggagaacgaccctgaatccatggaaaacgcgcccagcacctcagtcgatgttgaaagagatgacaggccattgctgaaaatactatgcttagacttctcacaagtggcacagacagacgctacggctcttcaatcattggttgatttgagaaaggccataaatcaatatgcagataggcaagttgaattccactttgtgggtatcatttcaccatgggtgaagagaggtttaattagcagaggatttggtactctgaacgaagaatacagtgatgaatccattgttgccggtcatacaagttatcacgtcgccagagtacctcaaggcgaagaaaatcctgaaaaatatagcgtttataccgcttcaggaacaaatctacctttcttccatatcgatatcccagattttgctaaatgggatatctagccaatgcatttacaatggacatgcaaacatttatatcatctctttttttctatattcctaaaccaaaaagttttcccccttaaaagtatacatttaatatcataatgagatagacactgtttatataataagaaataataggtaggatggtgccatcgtgagcatatacatacctataaatatttaccttatttttattttatttttctcttcctctcaggaacaaaagaaatacaaccgttattaatgttattgtcgtgggacagctcccctttttttttatttacttaccacagatagaaaaacatgaaagcagcacttacaaatagtataatagtgaaagttaataacgtaatatttttgaccttctgccaccacattatttcttttatattgaccgctttgcgcctaaatttattactgctgctatttagttgggaagttttatccaccaataaagaaactctttcttgtctctccaagaacttgtcgatgttatcgttcattatctggatgacgtcctttatttggtcttcggtggcatccccgatgtcacttatagtgttctgaccattcccattactagattggccatttccagaactatttaaagtttggttacggtattcgaccagctcttcatggaaagagtctagtatttgacctacatgcgaacttaaaagttcgtttgtagcgttggactcgtattcctgcagcccacttagtatcctgatgggcaaaatcttgggcatatctactaatgtgaagcaaacgtacacagttttggggtcatggtcatccgtggagtagaaacaatcgaatccgtcgatgagattcattgacatcttggtaactttgttccccttgatcggaactactttgggtaataccatatccatgatcaaattatggaaaatgaccggcgttatctgctcgtttgctgaagttattgtaccatagttttcgtttttctggaacggctggaaacaactagatattgtttcaccattttttataacttccacataacttactaagaccatatgcaaaatcaagcaaaatggaacgttagtctactgaatgtaacatagtaaaattatggcatggggggatgagcattcgcataatcccttttttaaacatttgttaattgtgtagaaatatttatacataccattaaagcgtttcatttggtaaaaatataaaagtccaatgctctaacagcttaataaattgtcgcttttcactctgttcttcaaatttaatagctgttgctccaacttagtcaagtgctagaaaattcatagaggggctttttttcatcattattgtgacctcattttttctttcttcgatcgtttgaggcgaatattacccgggcgcttggtggtaatgcgttgttttaaatattatatataatgaatgtggtggtagaatatatagtttactatttttagataatgcaaatgggtggggtgaaggcgatgaaaaggtggggggtctatcagagaaacctgctgtcacaccagccctttacgacatattgaatctctctcgtaggtgcggaagtcttattggtgactttgcctaaatttagttttccgcatggtttgagcattgtgccgccattgttgaaccatggcttgacgtctgagtgtacgcggaccaaagaacttttcaaatccgccgttgcatgttcgcttgcggattcacggccttgcgaaggttccgtattgcttgtcgttgcaacaaagtgcaaattccagggggtagaatcgccaaaaagatcatttcttgtttcatggaccatgtcagaccataattttttcctagtaattagggcaagcttaatatcgttcgtagagacatttggctcctttttgatttccaaagaccgaatttcggaatacgttagctgcttcaacagatggtcatctacttcgacttcgggtaaaatactcttccttttacatgatgtttcaatagagtataactttaggaaattggtattcaaacttttttgtcttattcttttattgggcaagagctcgctagatgcaatcgaaccgtcggtctcgggcgatggtgatgcagatggccattgttctaattctaccaggtcattttcgtaaatcatgttttctgtagtcgatttgctcctactcttccttcttgaagtcttgccgcctttcttgtcgatgatttggaagtccacagaggtcggacgaagtttggcatcggacgacgcagaaaccagtgaaagggcagaggacgatcgcggacgccgttcgtatacgggaggaaagatatcgactaaatccttaacctcccagtcgtcgaacaaatcgagatcatttatgtttattattttcattttgggcacgaccggctcagccagtacctcatcgccaatcgcgggggtctgcaaatcgacagcgtcagcaatatcatctgtcaagggatgaagtttagaggagctcaatgaagaacagtcgctttgagcttcctcggagaacttcctctttatgctctgtgttaagtggccctcatgtatggggcattcgcccgataacgtcttggcggaatttgttttcctaacttgcgacatgaccgagcttaaggacggggtcatcaaagatgagcgattttcgttcagcagttcggaatcgtctcgagccttcagtattctagtcctcttgaagctattcctcttggttagtgttctagtacgttcagcgcttccttgaccatcgaactgcggcttagtggagtggaaataaatctcatcgctcaccgtcctattacttgtggcggtcttgttcatgctggcgctggctaacttgttattcttcttattagtagcggtagcgtaaaatgacttgggataaaatacctttgatgagtcgctccatgagtgcaatgcgccatcatcacgtatgcttttgatgaggcaatgttcatgcacatgagcatcgtgcattagtgtgtgatttgtgttcacgtccagcagcattctataattatgtcttgttgaaagtgttctgtatgttcgtgtctatccaaagaaacaagtaattgagaaaactagccatcaaatacttgtgaagaagcgagtttccattctctgtttcactcgtttggcgttctcaccatcccacttttatttcattggcttttttaacacaataaggcgccttcagcacctttgccgcgcattaaggatggccactgacgaaaaaccggataaaaaaagacgaaaaaatgccgtctgaccctagtcaggagccgcctcatacaccctaattattttggcgctaagccctaagcatcattattacccgacatgaagcgacagaagccctacggatgtgcggctggaaaagaaagtttcatgaagaaccagttgatatatattttactatatacttttgctgtgtatttctatatgaggctagttggttggtgggaactggaagtgaaagttctgttctttagggtgcagcggttgctgttgctgttgctgttgctgttgctgctgtggttggattgatgcttgtgatgtttgtggtgcctgtggtgcttgtggtacagttttgctgccagtttgctgcgagtatgtaattatggggtgagcggcatttacattaggtgctggattgatggctggatttgttttttcgtaagcggcgatactaggcgttgtgctacttgacatgtttgcaaatgcattattaaacactggaggtgagacagactcggttagttcccttttctttgcaagctcttcgagccttttcttttcttccttcattttttttcttctttcacggtcttcctgttgttttctttgtttggcccttattattttcaattcaggcacaaaaatgttgcgcagctcaagttccaagtccctgatgcaccaagcgcagataaaagtggagcattcagacagcggtttgcgtttatcagtaggtcttgaagacttggtgctgggttcaagtgtggattggggtctgcgagaagaccttctattgccgtgcgaatttcccattatgatgacgccaaaatcacgttgcgacagcgtgtgctgtggggattttgtggttgaagatataagctctataatttttggaggttggcattcccaatgctgccacctgtaacaatgatcacagcatatcaatgggcggttattgaagaggtcagtctccgtgtcttcggtgataatcatgggcgccagctctggttcgcccggacattggaaaacagaatcttggttgtcgggctcttgctgcggagtaaagatcccgtagttggcaagctcatctagctcttcctttgttatgcagaagtcactaggcaattcagggacgtctcccgtctgtagtggcccaacagttccaggaattggtggttccaccgggattatactagattgaaagttagggccgtgatcaagaactccgatatcgatttcatttaagggattgtcctcctccctgcccaaagacgtttcaaaaaacggtgtaccagaaccacttctatctttgagctcgttacgcctggtcaatttttcatctctataatcttgatcgtacaattgccacaattggttccaaagaagatcttttatctttttgatttccttcgacactagcttgtttctgtgccttataaattgttctctttcatctagtttttcaaaccactcactttccaagtcttttttcttgttttcttcctctttcgctaccagtctcgaagatcttttcctccttgtcattagctccgcaattgctctctccttttctctgttggccaaaagttttgccgaatatagtctatgttcggcatacaccggtattaagttagttatgaactcatctatggctttcgaacttttattctctgaccagtattctagcatggacccccaattagttgtaatcacatcataatcaattgtaatcgattgaagatatgcatcgatatcgtgagagtactcgagatgaataagctccactgaatcaggaatgtctgggtcgctttcttttatagtacagttctgtagttttattgggatattcagagtttgagagacttgggaggaagagccttcttttactctgtgaatggttttctttacgagtacaccaacattgggtaaggcaaacaagctcttcatttcctcccctccactattatcatcatccagtataacttcactaaacgtaaacagatgcaagttattcgctaagtagtttttgaagatcatatttttcatttcaattaattttatgatactgtaaatgatgtcgaattggcgtgcaatttcaagctccaaaaaaggtaagtccgtaaccaaatctgaatacgcgctcgagttttgcaagtgatggttaactataacattccaatctttcaattgcccgcttttatttcccgctaattgatgcaataattgcaatctaattctgtcgtacaaattttgcgatccttcatctacgtcgacttcatcattgtaatagttcgagtccttcccgtctatcttcgaaaatacgtcagttacaaatacaccttcatcgaatttgatattcttccacaagcatttggtagagctaccgccatactggtcagtattaaatgtcgttgtagtatatgattcgcagacattggaaagccaagccatcacatactggaagtgccagtgattggccaagtccgcgatcttctcatctaatatttcagaatacggcagctggtgcttgttcaattgggctattatgtcttcggagacatattctttccagtcttcactatccgcattcgcagcgccggcaggcatgctcgctcctacatttcttgtacccctagttctcttcgttctcatcgatcgctgattcaccgctttgtatctatatatgattagccagtgtgtatgagtaaaatagagcaattgatctagtttcttagtcgtgtcactattgaataaataaatgttaatgttgctggaaaggaagaattatgtcacttttgacgctctcgcattccgtgtgcggtgatagcggtaacttggtctagcaacgaaaatttaaaaaggttggaaaaggaaaagaagagctcaagtggacctagaagtcctgctttgccaccgtttaagcaaggaatagagcacgccgttgacacaaattcacagtcaaggacgggccacgagaactttattacaaaatatactgcattacacgaaattcagcggaactctgagcgcgaacagcattaggtaccgagaaacgcttttcaaaagaaatttctaaaagttttattgtgccattaatatcgcggctcaattgttaagtatttcactatgcctaatccgaatacagcagattacttggtgaatccaaatttcaggaccagtaagggcggatctttatcgccgacgccagaagctttcaacgacacgcgagttgctgcaccagccactcttcgcatgatgggcaagcaatctggaccaagaaatgaccagcaacaagcaccactgatgcctcctgcagatatcaaacagggcaaggaacaggcagctcagagacaaaatgatgcatcgaggcctaatggcgccgtggaattaaggcaatttcatagaagatctttgggagattgggagttccttgaaacggttggcgcaggctctatgggtaaagttaaattggtcaagcatcgtcaaacaaaggaaatttgtgtaataaagattgttaatagggcttccaaggcttatctccataaacagcactctttaccttccccaaagaatgagagtgagatattagaaagacaaaagcggttagaaaaagaaattgcgagggataaaaggactgttagggaagcctctttgggccaaatcctttaccatcctcatatctgtcgtttatttgaaatgtgcactatgtcaaaccatttttatatgctttttgaatacgtttccggtggacagctgttagattatattattcagcatggctcattaaaggaacaccatgcgaggaaatttgccagaggtatagctagtgcgctgcaatacttacatgccaataatattgttcatcgagatctgaaaattgagaatataatgatatctagttcaggtgaaattaagatcattgattttggtctttccaacatttttgattataggaaacaattacatacgttttgtggttccttgtactttgcagcaccagaactattaaaagcgcagccatacacaggacctgaggtagatatttggtcgtttggtattgttctttatgtcttggtctgcggtaaagtaccatttgatgatgagaactcaagcattttacatgaaaaaataaaaaaaggtaaagtagactatccttcacacttatccattgaagttatatctttattaaccaggatgattgttgtcgacccattaagaagagcaacattaaagaatgtcgttgagcatccatggatgaacagaggatacgattttaaggctccatcatatgttcctaatcgtgttccattaacccctgaaatgatagatagccaagttctgaaggaaatgtatcgcctagaatttattgacgatattgaagatacaagaagatcattgatccgattagtaactgaaaaggaatacatccaactttcccaagaatactgggacaaattatccaacgccaaggggttgagttcaagtttaaataataactacctaaattcaacggcacaacaaaccttaatacaaaatcatattacaagtaatccatcgcaaagtggttataatgaaccagatagtaattttgaagatcctactttagcatatcatccattactatcaatatatcacttggtttcagaaatggttgcacggaaattagcgaagttgcaaagaaggcaagcattggccctgcaagcgcaagctcagcaaaggcaacaacagcaacaagtagcacttggcactaaggtcgccttaaataataactccccggatattatgaccaaaatgaggagccctcagaaagaagtagtacctaatcctggtatttttcaagtgccggcaattggaacatcgggaacctcaaacaacactaatacctcaaacaaacctccactgcatgtaatggttcctcctaaactaacaataccggaacaagcgcatacttctccaacatctaggaagagttccgacattcatacggaattaaatggtgttttgaaatcaacaccagtccccgtgtctggcgaatatcagcaacgttctgcttcacccgtagtaggtgaacatcaggaaaagaatacaataggcggcatattcagaagaatatcacaaagtggacaatctcagcatcccacacggcaacaggaacctcttccagaaagagaacctccaacatatatgtcaaaatcaaatgaaatttccatcaaagtaccgaaaagccatagtcgtactatatcagattatattcctagcgctagaagatatccatcttacgtgccaaattctgttgatgtaaaacagaaacccgctaaaaacactaccatagcacctcctataaggtcagtatcacaaaagcaaaacagtgatcttccagctttacctcagaacgccgaactaattgttcaaaaacaacggcaaaaactattacaggaaaatctcgacaaattacaaattaatgataatgataacaacaatgtgaacgctgtagtcgatggtatcaataatgataatagtgaccattatctctccgttccgaagggtcgtaagttacatcctagtgcaagggctaaatcggtggggcatgctcgtcgtgaatctttgaaatttactaggccgcctataccagcagcccttccgccatcagatatgacaaacgataacggctttttgggagaggcaaacaaggagagatacaatcctgttagcagtaacttttcgaccgttcctgaagattctaccacatacagtaacgatactaacaatagactgacttcggtgtattctcaggagcttactgagaagcaaattttggaggaagcttcaaaggcaccccccgggtctatgccatcaattgattatccaaagtcaatgtttttgaagggttttttctctgtacaaacaacctcctctaaaccattgcctattgttcgtcacaatatcatatctgttttaacaagaatgaatattgatttcaaagaagtgaaaggcgggttcatatgtgtccaacaaaggccatctattgagactgcagctgtccctgttataaccactactggcgtgggtttggattccggaaaggcgatggatctgcaaaatagtttagacagtcaattatcatccagttaccatagtacagcgtcctcagcatcaagaaatagttcgataaaacgccaaggttcttataagaggggccagaataatataccactaacacctttagcgaccaatacacatcaaagaaattcatctatcccaatgtctccaaactacggaaaccaaagtaatggtacatcaggggaactatcttccatgtcattagattatgttcaacaacaggatgatattttaacaacatcaagagcccaaaatataaataacgtaaatggtcaaacagagcaaaccaatacttctggtataaaagaaaggcctcctattaaatttgagattcacattgtaaaggttcgtatcgtcggcctagcaggtgtacatttcaaaaaggtttctggtaatacgtggctatataaagaattggcatcgtatattttaaaagaattaaacctatagatacgttgttcttactaaatatttcaacgtgtgtctttcaatttttattatctaatatttatctttttttaatattatagtataatttatttaagctgagatctgctttctttaatctttcatatgatgaaataatagttctacataaatctataagaataataaataaagtaaaacaactgcaaaaaacatcgatgtcatccaggatccttgaaagatttcactctggagaagaaaaaagatttctcatttctcaacgaacagttagatgcattcccttccttatccactacaattgaacttagccatttcaaccgttgatatctcttattgccttgattcttgatttggaattcttcgataaacgtatacttttcatctgaccttgttatctttaaatgaccaaaatcataatcaaatccgaggctccaataacacatatgactatgcctgggtttgttctctttggagaagtgcttcacgacagcgctaggttcatctgtagaaagtaatctcaaacattggccgttctcataaaatctgaaatacctgtaataggtgatcatgtgaactggctttaaaagagataacgaactttctgcattggaaccgtatcttacataatttactacactgatgtaaacaccttcgaatttaatatatggcctttcccttaacatacgataatcatcaccccgccatatttccttttcaaaggtatttatatcggtgattccgttaagatccattgccattttgtcgtatatttgcttagaatatatgtacttcgcgaaagttttaaatggcacagaatcgtggaagcaaagcttgctaaaggtggaacaagtcatcgacaaattcacccaagattcaccagacattaatataacttttttaataattctcagtaaaatgtcgtcaggcaagatttccagaatccagcagggttgaagttcagcattttcttcaacagataagtcatctttaccggtttcattttgttcatctggagcatcagtagtcattgataatcccgatagttttttgtgcagcatccactcatcaagtattttttttctgtacagtgattccacattatcatggattttcaatgcacttcgatagaagtttatagcatctgacattgacccatccttctctttcagtacacctttttcccaaatagcaatagcctctttagccctagggtccttttcataatctactatcatttgctccttgagtttagcttatggaacacatgtgtcgtcgccaaagatgatggggaatgtttgcttttatcttgctcagtcgatttcgctatctaggaactacaatccttttttttgtcatttggaaggctctttaaaattccgaatcgataagttcggaggtgggaaaggatagcggtatattccttcccaaataaaaaggctacaaacacattacataaagaatatttgttcaagtaaacatatcctcttcactcaagattacttcgacaaaccatcattggtgtttccaccaatcagcatatcaatctcattcaataaagtaaagtcaaaattgtactctaaggcaaaatcgttaccgtgagatagagtccctaataaatccatagtttctgaattatgcaaagcatcttcagagttttctatgaattttctagcaagttcgtaattcagggtaggcgcacttaaaaaatttaagaagtcttgttttctatcctttttaatcaagttggacttcatgcattggatggctaaaatcgcagaataaatcatgtaaattgtggccttctcaaacgtcttaaatttatttttccaaacttttaaaagataatacagttcatcaacataaccttcaaccaattcccggctttgtttgatttcgtatatgaaaggtttattataggaaattagcacgatatagtaatgaaaccatacgtaagctatggttgggttaaaatctgtcatttccatcaatgacctcttggtccattgtagttcagggggcaaatcccttctccaattgtatacctccagattaaatttggccaagtattcactcctttgaagtagagtttcgtttgggctgaaaatcttggatgcaaaaatctccgttattctcgataacacaatcagtttcttcaaggggtttgcagtggacaatattacttttgggtcatatatgtactcctctataccagtctcaatttcaggtagctcgtctgtttctggaacagtggaattggacaaacgcaaggaagttgatcttccaaagaggatcgctattaaatgatcagcaatgtagcagccccaataaattctacttctcacttcaaaatccattattgacagctcgtcttcataaacattactccatgcttctggattcaaatgtaggccgatttcgtgggcaatcctaaatgccagcccagaaagataccaagccatggggttttctccgcttccaatgtcataaaatgccaaacacaatagagtctggatgattgctaatttcgaagaggacgacgattcagctaacgaagaatcttccagttgaaaaatttttttgagtactatcgtcttggctctttgataaaacacttcagattgttgaaaaagctcagtttctgatttgtatgaaatcaaagatcccaatgcagcgattgcaaataccaattcttcggaacaatagtaacttttagtgttagtatcaccgaagaaagcacttaagaaagtttctctatgaatgaaaaggtaatgtcccgggtatagccatttgaaaaagagtgacaacgatcttaagataaggggacttcttgataaattttttaggctgacctgctgttgctgatatcttgtgcttccatccgtcttcttttttattatagacaaggaatttgatggatatatactatttgtgccaactggtggagggctctcggaaggcattttcttggtgaacgcatcagactcattctcatcgttgctttcagatgatggtagtgctgattgtgctgtttcgccatactttaagattttttcattaggagcatcaccatgatcactgttgttttttaacgaggagagagcattgctagcaattgtggaagacgaggaacttaatatttgcaactgttctttcaaagaccgaatctggctctgtaaagcttctacgtaagtcgtagaatatcttttgttccttaagtcttgttgagtgaatacacattcggtacgaaacttgatacagtttgaacaaggcttttccatgttacatttccttcttcttctacggcaattctggcatgctagttttctcttcctgggcacgttgttattattctggtcattatctgtcacagatttctttaaactggacggaagggagggtgttaccgttgttgttaaaggtggaggtgaaggctccaacatcattgctgcgattgtgtagagcttcgagttttaaaagggctatttttgaaaacttacggcgatgtcaacttgttgattttgctttgtttcgttcgggatggatcggaacatccgctcacatatgagaggtttacactcttgatgtatatgttgctctatcttgtatacggttaagtaaagtgatgtattatgtatatgtatgtatttatatatatatatatatatatgcgtggttttccatattgtatttttcttctctactctatataggcattactttgacaggaacgagactaaagaagaggcaaagtgctgcgggttgtccaggaaaagattatggccagcatcagggacttcaacgtagctagcctttgccttgttttttagcattgattcagtagtcaagtagcccgcatatttatccatccaatcgtgctcgccatacatgaacatgacaggcgttgctgggttcaaaaaacgaacgttgtttattatcggatctctagcgatcagattcctttcaaacaaatgggtgaacaccttgattgtctgtggttgcaccgtctggttcttcccgacaaatgagtgcaaaagatagtccttatatatctgatccggaacttttacgtatgcggtggagatgtagttcgagcacaatttggagcctatgggtcccatccacttcaaaacgtttagctggttttcaaagataaaccgcggtacgttcagctttcttgtataatatcgggacgatgggtcggtaaacgtaagtggataggtggtgttgggctcccatttgtgggtgatagcatgtatactgttttccacaccaagaggagatatgagacacagtttctcaatggaatcagggtacttgagggcgtatttgaatgaaatatatcctccgaatgaatggcccaccacgtttattttgcgaagcttgttatccttccgccattgctctatcctgtctacgaagtagctttcgtactgctccaggtgtgacttgatgtcctctgctggggggcgcttctctatcacagggattactacgtcatcttctatatgcttaaacctgagagacttgatcttcttggttttgttcacttgcaatgctggcgcctctgaggcaccattggctggcaagtcgatggcatatagatctttaatgttgtctgacaggttctcaaacgtcctgtagaacgccatcgacgaggcagcgtatccatggattagtactgtaggcgtgcacactttgttcgcacgcttattgtggaaatgccactggttaatcccgcctggagtcatcgtgttattaacggacccacgcacagtggtgctatccataatttgctgctgcagggccttcaggccctgcacgctagcacacaccttggcgtctgcagtagtggtctccttctcagttttgctgcaccatttgaaagtgtttgtccacattctactgaagaaaactacgcttacgtatgtatatgtcctgaacaatgagagaaagacctgcgaatatacttctactactccacgtacaaaaaagagcacgctgctttatttatacttttgtgccacaagaatgatcaacatcaacataaatatcaactagtatctgcaacacatctgctccacggaactaaacccgttgagcagtgccccgtggaaacgtaaactatcgcaaattgggattaacaagccaaaaacagccaagcaagattcacgaaaccgcgcctcgtttggaccccgaaggcccatttaacggccggccgttacaagcaagatcggcagagcaaaccactccccagcaccacagcacatcactgcacgagcaacaataactagaacatggcagatagcgaggatacctctgtgatcctgcagggcatcgacacaatcaacagcgtggagggcctggaagaagatggttacctcagcgacgaggacacgtcactcagcaacgagctcgcagatgcacagcgtcaatgggaagagtcgctgcaacagttgaacaagctgctcaactgggtcctgctgcccctgctgggcaagtatataggtaggagaatggccaagactctatggagtaggttcattgaacactttgtataagtgtttgttgtttatgtatccgcatatagcagttataacagataaatggcacttttcgcacacccgttgttttatctccgatagtacgtgggcctttatttatggtcgtttaacgaaagaacggcatcttgaattgagcaggtatttaaaagataggacgagaaacaagcacatgatctgtgtcgaaaaaaagtagcaaagagaaaaagtaggaggataggatgaacaggaaagtagctatcgtaacgggtactaatagtaatcttggtctgaacattgtgttccgtctgattgaaactgaggacaccaatgtcagattgaccattgtggtgacttctagaacgcttcctcgagtgcaggaggtgattaaccagattaaagatttttacaacaaatcaggccgtgtagaggatttggaaatagactttgattatctgttggtggacttcaccaacatggtgagtgtcttgaacgcatattacgacatcaacaaaaagtacagggcgataaactaccttttcgtgaatgctgcgcaaggtatctttgacggtatagattggatcggagcggtcaaggaggttttcaccaatccattggaggcagtgacaaatccgacatacaagatacaactggtgggcgtcaagtctaaagatgacatggggcttattttccaggccaatgtgtttggtccgtactactttatcagtaaaattctgcctcaattgaccaggggaaaggcttatattgtttggatttcgagtattatgtccgatcctaagtatctttcgttgaacgatattgaactactaaagacaaatgcctcttatgagggctccaagcgtttagttgatttactgcatttggccacctacaaagacttgaaaaagctgggcataaatcagtatgtagttcaaccgggcatatttacaagccattccttctccgaatatttgaattttttcacctatttcggcatgctatgcttgttctatttggccaggctgttggggtctccatggcacaatattgatggttataaagctgccaatgccccagtatacgtaactagattggccaatccaaactttgagaaacaagacgtaaaatacggttctgctacctctagggatggtatgccatatatcaagacgcaggaaatagaccctactggaatgtctgatgtcttcgcttatatacagaagaagaaactggaatgggacgagaaactgaaagatcaaattgttgaaactagaacccccatttaatatatctctgcgtacatatgtatatatatatatgtgtgtatatacatgtatgtctgtatagaaaacgcatatcaactgatatatatacacgtgaagcaaaaaaggcattgcctctgtcagagaaacgaactatcctcgttgctatagtgtcttctgcacttatcgcgtagactttctattggcactctgtcatggcatttaatcttgtacacattctttaattcttcttgcaaaagaaggtactcttcatgcaaatgatgactttggagtgaattgactaatcctgagtcgttccagaaactttttaaggcgttcgtttcatgatttattatgtcatccaaccgtctcatattaggtttcgaatttgttacaaattctcgccttgataacctctccaggtcttctttgttgcatccaggtacactctctaacaacattgaaccattgccctccggattcgcactgtcatatttattagcctcttcgccgcacatgatgtcaatatcgggtcgatagctgtctatgccgtctagatggcccaccttatgaaacacaagacaatgtgctgccctttcggctttcaaaaaactgtcaattctactttcccttagcgtattgcgctcacaaaacggtgaataatcgtattgcttttcttcctcgatgtggctcaaagtattcagatagtcgacttcgtctacgtccatatttatcccatagagatcatctgcagtcctctcctctagtacttcgcctgttatgggcatcgaatcatcatttattacccttgtcgaccttttccgtagcggtgtggtaaaattgttaaagttggctttgttgaaccttggtgttttccagggcggcaatgacggtagttgaaacaacttgccttcgttcttatcaccattttggttcatcttactttgtcacagctatttctttccttcctgaatttgtccttccaaacctagttccctgttcttaatttccttttatttaggtttttttttttgttttgtcaagagccgcgcacaaaatatggtattattatagaaaagttggacttaaaagcttgaaaaagcttagattttatattcatatgctggtatatatgtacgactaaataatataaatttgattataacaatccactcaaggtcagcttctccaggaatggtgaaagatcttcacgacgtatttcaattatggaactttcaaaattatctattctcactttagcatccgtttctgcagttatttgttgaaacgccatgctgaaattattcaaaataggtttttttgtgtgtatcgtgtctagtccgcgaggatacctaggtgttaacccagcaaccaagtaagtgtccgtattttcatctatgctggcaagcaccatgggcaacaattgcttgtcttcagattccgcacagcattctatgagccaatttcctaatcttaataacgtcaatgggtttctgtacaagtctaaatcgggtccgtcttgtaagacgcataatctataaattcttaaatgcttgattaatttcttctccaatatagcaaccccggtattaaaaattgctctctgtaagtcttgtgctagttgaatgccacggtttaatagttccacctttctgtcatctagagcatcccaactgagccaaaaattcgaaacccatctttttctcaaattcgtcaatttttgagcgctgttatcttcttcttcctctccatctgtatcgtcattattgtcattatttattttcacactatccttatcagttgaattacctacttccaaaagagctgttagtgcttcgacaaattcactggcacttatggacccacgatatccaagagttctaacaaacccatctctaattatatcttgcaacccataacgatccaaatttttgtcaaatattatcccaagttctctcttaatagaatgatccatgtataaccatgtttcttgtgcagtacttaatggtatacccattctagcaaacatcttatgcaatctctttttcccattttcattccatagggatagtttggcattgacatagttagaataataaaaactgtcgtacaatgaagaatgcctcagtaagaaaaggtagtaatccggttggatgtttaacgtcaatgtatcaggggtctttactgagtttctactgcttggtgtgagacgcttcacttcatcttgcaataaggggtataatcgattgtaaacttgagcatatgctatatctaacgaggtcgtaccaagtatattcaaccacaggtttgaaagatttgtttctccgatagcagacaataatgaatagatttgtgcagatatcgagttaaccactgttgtgccttgagaatagtattcctccaaaacaccttcatattcatggatttgcttctttcgttgctttctttttgagagatcattcggtcctattgaagaattacctcttttattagatattgtctcatcttcgtcttcttcgtcctcgtctgtgacttcatcggcatcagttgcctcatcgtcacccccattattatcgttctcgtcacctgagagctcatcgtcaccactctcctcgtccagttcaagcaatttatagtatgcttctttttgttcgcctaatgtgtcatccaccgtaccgtcgtcaaaacattggatgatttgtgatccaaatatattgtcgagattccacggtctatgagcatccaacacgtagatgtctctcctgaaactttgttcccccgacttttcatctgtatcgataacatactcttggggatcgatttctaagaaagcctccagatcaataacgcctccaaaccctactaatagcagactatttatattgtcatccaattgagaatagtggcgtcgtaattcagagtacccaaatatcggtactatttgagattgtaccaattgttttttgaataatagtgacaacatcttcgtcgcacacagcgcatcgatgttaagacaagaaacgaaaatgaccaattgacatgatgaatgagacgatgaattccttaagattttgttgtaggcttcgctaaactggctgattccataatacatgtgcgagagtatattcttgttattatgtgccttctctctagtgtttattgctacacttttattgctctatagtgcgttgtataaagtagccacaatggattgttggcattactacagcttcattatttactgaaatttcttaaaacgcgttagatgatatgttgaaaaaaaaatacgcgtcgtgaatgaaacttattaggttttacgactagttaaagcaagagagagaagatcgaattgactaaatgtcttcactttgaatttattctagtaggattcgcatggctttttcataataaaaatctcgtttatttatgcttttggttggttttcctttgataaatgcggcccttgctttgtttgtggttgcaacgagttcgtcaaatgataaattgacgcttaacacagacgcatgggaaccacgtaattgaattaatgttttcttctcgaaacaattgcaatgtgactttcttgttaggcaatgtgagatgaaagatggcctttacctttgcagatgtttgggtgtggctctgagctgtcctttataattatagagataattttgatgaaagctcagaagacctttaatgacgaaaaataggcatggtttgccaggcaaaaaacgaccaaattttactgtagtatgagtcaaagtcgctggagtatcgttctcatctttgcattgtttatttttggcagcactggagtgaatgccttcttcaatttcggtcatcatcagcaacagcaacagcaacagcaacaatcatatgaagatcaagttttaaataacccttgtgatgggtatttgtgtccggacaccctaacgtgcgttgcacagcagaaagactgtccttgtcccttccctaaatctcagttgaaatgtgtccttcctgataataaatttgtttgcatatccaaaccagccacacacaatgaaaagtttagagcaatatatgatgaccctgtcaagggccccaaagcaaagaacaaggggtttagggattgtggatgggtatcagatgcttacaaaaaccattgaaatctgtataaaaaatacatacacatacatatatacatacgaaggatttatcttctcattgatattctagtctctatttcttccgggaacccatctcttatacaatacttcaccaacttgaaaactattgaacaatttagtaaagttgtttgatttccatagtgctatcgcctcctgttccgagattagtctctccacgtagcataacacaaacgtcttctttgcgccgcccacaacacgggctatgctagaataccacgtataatctttagagacgtcgtggtcaagacccataacacaaaattcagcgtgttgaaatggtggccctctcttatataataaataatcgcagccgaattttataccagatcttacgcaccaaccgtgtgatctgtagtgatggtatataacgtatgatctgacaaaggagtgaatatctttatatttggcatcgaattgaaacagtttccctgccaggcacgcgggagatatgtcaagaacaggaagtgcaaaagttaaaaacatagcttccactggcattagttctagtgactctagtggcaaaagatcaccgttctcatcaagaagattgttgtcttcatctcttaaatttgattcggaaatgtcttgctgttgtgcaacgatgcccacgtcttctgtttgttttagtttaaattttcttaatgattctcgttgtttctcaaggaggatgttttcctcatcgatatgaccacctttttttcttaattctagtaattctctttctaacttcgcacgttctttcttgaactctaatctttgtaatctcctctgttgtgtgaccttctctaaagtcatctccgtttcagtattactctttgttcctccccgattgtggaggggagtatcattgagacccagtctggcctctgttctagctttccatgtaggctcactcctgctaaattgaccagtgccaaaaaatccattattccaaagatatagcatttgcttgtcatcttgaaccgtgatgtgaagagtggtatctcctataaaatctacatgtactttatcgttcagtgcgttcgtactcttgtaatagcggtatgcccaatatagccaagataacggattatgaaggattaactctggaaggtcatctacggggtgaattggaagaggatacttgtaacgcttctgattgaccctccctttagacatgctccttcttgagtccttcgtacttattgtcttttcagcgtcgtgttacaatgaaacgttttagcatattgaatttcgatggaagttcaaatgttttatgcaccgaaatgaaatactagagcaaagagatgttagtgaaagcaccagctaatatagctctttcaaatttacgtgaaaaagttatgtgtggcaatataaatctatagcaagagtggcttctataaaacatttttgacaagaaataaaattcagataccgttgtagtcttgagaaatcattgtgctcacatcgattaacttcgagcaacataaatcatgctatcatcattaaaataaagtggaagtattaagaacagatataatagcacgagaaaaaactcgttcaactaagtctagacacacctcctggtgttatttagtccgttctcttaacaaccaaagcctacgagctctcaaacagctcttttgttttaacttcctatagaactgaatgggaaacttgcatcttgaagaaaatttttctctttaaatatctgactgaagtattgatcccttcaaaaaaaaaaaaaaagagagttggttacccatatgggaataatatttcttagggctaattgacaaaggattgctaacagaaaatgcaaaggactaataacttgaatcatttttatatcaggtttatataggtatacgttcagtctaattaataatttatagtttacagtagttttttacagtagtttttttttttttttttcagttccatgatttttttgttcctttgattcgtgtagtaaacctcctcttcttggttttcacgatatacttagctggatgccaggtctgtaaagtattgacgcaaaatcagtgaaagcatttcgggtagttcgcttatatcgtgtacaacaacataaaattcaaaaggaaatgtgtccaagtatttggtaatctttaattgcggattgccatactgatctggaatgtagttcacttggctcatgtctaagatggattcattagaagtaataccatctatgatgacaaaaaccagcataattttgttttctctagcacggcggaccagtttttgtattgtttcatggtcttcgcaaataccatcagagattacaatttctagttgccattggtcattatgtaccatagcgcgagcacgttcaaaaattttagtagattcagccacaagtttcttaacgtctgttttagtttcttggaaaccaaaccattgaaaagctcttgcgccagattcgttactaaattgttggtcaaatgagtgaacttctttaatattttcaccgaatttgacaatagataaccctccagcctctagctgagttaacgtcttggagaccaagcataaactatcaaaagcgagtttaacgcatttagattcgctcatagacttagaatcatcaagcgcaatcattatttgatactgacgtttgcttggtttagttcttctcaaccagattttatctttacggaattgtgaggcaatatatggaatgatccgtttcatattcagtctcttacctgttttgtaatcacccttcagctttgtagccaaggtaggttccaagattagtcttaattgttctccaagacgtgatactaaatcggcggtcgaaatttcacttttatgccacaattcacgggattcttctaacgatctttccggtgtcaaactagcacttgcatcaggtggattatcctcaatgttttcaattaaagattgtatttcactgtcatcctcttgatcagccgagaagtgttcatttgaaagttcgttctcaaaatcttcctcactctttcttttaccgatgaatcctgactttttgctgtcaacgtcattgttagcgtcatgcgcgtcgatatcagatagcatctcttcttcatcaatatccattttttcatcatcggcgtcttctactaactctttctggtccacttcttgctcctccctatcatcatcaatggccatgtcttcatcaatggtttgtaattgatcctgtgttgcagaacctaaagcttgcgtatctgtttcagtatttgcaccctcaacatgttcaaattcatcgggacgttcattgtttttttccaaattttcgtcctcttcgccattagtttgtgcttcttttatatcttgacgacgtctatgatattctttcatgctatcacctagttgctttaaagcagccgtagcctcttcgcgtgattcttcattattctttgtcacatcttcttgatcttcttcataggtattctgagtcgttcctgaacctccaacatcgtcctgttcttgtgtgtccgtagcatcagcaccagcacctttggatccagaatcttgttgaacggcagcttcttgatcgatgtcttcagtatcagccttttcctcaacgccatcaagaccttctgtattctgctcacctcctttctctttgttttcttccatagcagcatcttgctttaactcttcttcatcagacatggcttgctcttctgggccattttcttcgtcttcctttccctcatcattagtcatatccacatcctcttcagcaccttcttcttcgtcaagagctgtttctgtctcgccggcatcttcctcaggaccaggttcgtcgttttcattatcactttcgataccggattcttgtttgacttcttcgtcttcgtttccaacctcttccttgtttaggtcatcaggcattccatctgacatatcaacatcttcgtctgattcttcatgctctgaatctaaattcatatcttcaggaaggtctagggtttcgatttcaggaacattagcctccaaatcctcgccttcttcatctttaacttcgtcctcctgttcaccaacgtcgttttcctcttctgcattttcatcgttttcaatttcctcatcgccatcttcaggtgcatttgggtcctcatcccctccttccttgttatcccgctgttgttcgtcattttcagcagcttgtacatcttcctcttgattttttccatctaaattctggtctgtatctttttcttttgaattatcacttgccttatcatcccacattttatcatcaatagcgttggggtcatcttcattcaggtcatcaatttcttcatctaattcttcttcttcgctatcagtatcttcatcatcattttcttcaccattagacaaatcttccaattcaccagccatatcgccctccatctcaactgcatcatcttcattctcgtcatccctctcatctttatcttgttgttctttgttttcgttttgtgcatcctcagtcaaatcttcgtcttgttcgacgtctttattgttattttgagcaccttcaccgtctcccaagcctgtaccctcttgcaagtttttgtcgtcaacttcttcagatggtggctgcggagaacagaacccatttttggctaagctatgcaatatcgtcgatagaatgtacataccacgacttgtgttcgtgtagtagattctagatctttcaagaaccacggtcattgcgttgtaataacgtgtgattaccggtagtgtaaaggatataactgatttaacgtaaattgattcagtagtggtaaaatcaaagtccttcaacaaggataatgctgtctctatatttttagaaacaacactggatcgtaatagtttaacgtttaccataactttcttgaagctagctgataaccagttatcatcagtttcggatatagattcaattccatctccaattaccttctggaaagataatataatagatgtgaaagtacggcggaaagcctgttcaacatcttccaccgaagggcctctcttctgttcctttttaataggaccccctttatttgctttgatccactctataatgatatcaaaaacgaaagcgttccctgtctcctttgcattttcaagcttcttcaataattcattaatgaataactcaaatctagaatatgactcgataaatgaagaatcaaaaattcgactggaattgaagtgtacgaaaaacgaagataaggtcgattttgcatctaacaagatcttttgttgttctgaagttgctgagtatttcgaaataacagacaaggtctgtgcggcatagtctaacaaagaaggcagccacttttcaaacaatctgacattatctacattcgcttttaatgaagaatgaacaatatcgccctttaagcaagtaaagtgttctaggtctaacatcataccattaatcttacagtaatcattcgtgaactctgatagagggtgacgaactgtaatcagggaaaacatcaaactctgtgcgagtgccatacctctttctatagcagcaacagggatatcatcacttggattcgatgcagcgcttctcagcttgggtaaaaggtcaaggattttgaaaaagaatgcgtctgacgaatttaaatattcattattgaaaggggcaatgtttgccaaaatagttgttgtagaagattgaactttttgaatgtcttccctaaaattgacttttaaaccgattcttctcaattctttcaatgcatcacctaaaagtttacttttttgagtcttcaagtatgccaacctctttttgttctcctttgtatatacattaggggtttccttacgtaacctttcagcttcagcataaaagtccgatgctaaatctgcgaagttagggaattcctgtgatgatatcttttccaagtaggagtccatgttacttgctaccgtgtcaatattccttaatggcgcagctctcatactccaagtagaaatttctttcaccaaatttttcgaagcctctaagttggggtcttcgtaaaaatgttgttttaaagtagggagttttagtttattttcgttggaatacaaaagaccggcctcaataatggttttcgcatccccatttagcaaatcacggtattttctgacaattttgtaaaggttgttatgagacttacgagaactttgtttcagggcatcaacgttaacatctttccaactggctaaaagaattatatcgtcaatttctttttccagactcttttttccattcgtaatccgctcatcaattaatggtttgaactgataatagaattttatagtattatggagcaagcccgctatcttcgagctcctcaatccaattagttgaatgtgcttgtagaatgcttttacaagatctagcctggcgttgaattcgcccaatgtactcttactaaaaaataagttaagtgagcttaccaaaagtgtagcgttaggggccgtttccttcttttcactaacaaaatttgaaatgacaattgactcgtacaaataaaaccaccattttccaatagattttctggtttttgcgtcttccgagttgaaaagacctttccaggtgcgtaattctagttttctccatgaaactatcaaatctgtaatcagtttaacggtgttattcagggatacttccgaggaagcgtatttttcccattcagctaggtatgtatatatttgttcgatcttttgaagctgtcttgctaagggtgttttaatggggtagtttaaaaattcttgggaaactcgatataattctttgagggtggcatgttctggccactgcttcaacaatttcaagactgacttaagcacagtttcaatgatatcacctgctttttgaaactccggaatagagaaatcgtggtaaaaatcgatattaccaaaaacttccgtgtttttgaaagattgtgtttctgcatcaagtgtattaatcacagcagacaacgatccgcttttcaactcttctatcctggtgttttttaaatcttcactcaaaattgttgttattatcgcaccgctcttcaactcagaagaaaagttggcgtcatgatctttgtcaaataccgagatatatgtgtcggcaagcttgaaatagatgtcatcaagattttcaggactcgaaatatctttttcattagttaccaaagctgtgtcctcataatctggaaacagctttctaaagtctgcctcgtaatcatctgaattatcattgaatttgaacatatttgacttttcgttttcctcctgctcctgtctgaaacgtctcacagaccatcttgaatacagagtatacaaagcagcctcaaaaatttccagtaaatttgtatccctcttatggaacttaaacagcgtcaagaagtacatcaaaaccttttcaatcgaagtatcttccatatcaccctttttgaagaaccttgacagctcatgataagcgcttaaaacattctctgcgcatgaaatattgatagggtccatactccataaaggagaaatttggaatgatgctctatccttagatttttgaagcttcaataaatcaaagccaaagttgatactgtaaatatatcccgcgaggatatcatttaaatcagcaaattttgaataaccgctttcgagacgattcaaaaaatgtgcactattttgttggagcatttctaatctacgatccgattgatctgaattgcacttgtaggaactcactagctcttttatttgacgagaactcatagttgacgacaaaaatgccatccattcatcaaataaagagtcaatagacatgcctgtacgatataccctaggggattgaggtgcgtcgtcatcgcttatggtattgataagtttttctgtgaaaatctcctcatcgccactgattactttacgaacatttctccaacttttcattaggttttgagaaaatgtctttgtcttcaaaaataaatcatataaaacgtaatcgtgtattgccggatcatagggagaatctgggacgaatagcagaagcaaacctgtaccaaatgtgatccaagcttctcccagttcttctaatgatttcgaactttcagccaaatctagagcgggaaagatgtattctgcaaaagtcacgcgtgtctctgaagcagttttttcttctatgagagagcaaagttctttcaaagtcaatttcaagcagtccccgccgacgtgaatatcaataacttttctgagccatgacagtaacatatttttatagtactccatttggctcttaagtaggttaggtgaacacttgatagtggaggaaagtagcaattctgcgtcactaatagattgtttgatctgatttcccgaaaatgatttcaaattattagatttacgaacgacatcttcgagaaactgggatgaaaatatggtagaagtaaaggaagtcaatttagcatttttttctgtccaaagaacatcaaagataggcggataattgtatttgttggtaataagttttgtaagtttttgcgtggctaaagaagaagcgggagcaagttcttttattagctcggctgtgtcaactgagaaggtatatctgatcaaattgtcaaattcgtcagcaaaataatgttttcttttgtttaaaaacttatttgaaattagttccaattcatttataccatcttctaactttgatagcaagagattaaactcacttaatttattattcaacacatcatcatttagcaaccggaaaacgtccatcaaatccttaatggaattgtatgattcagaaaattggagcagacgtactttgtcaaatttttcagataaattaatgagcttttcgaaagctagccagctgttggaggttgtcggataattttttctgaatatatcccatagtaaagttatggagtggcccctcgacaactgtaaaacatcggtaaattccaaattgatgttaaggaagggagttatctcaatgtctgatttggattttacggacgcaatccagctatctatcaactccttatatactcttagacgtgcttcatcctttgtaacggcggtttctaatgctgcaattacaattaccagtaaatcccaataatattgatattggttggagccgcaaaataaactttccgtcttaaggttttcagacattactgttaaaatattgtagagaatacagaatattggaatgcgaggaatattcttcaaatggcgaccgttaaaggcagccgcagataattcaatatacgtcagttcgtcaattttaccatgagttgatttttcattgattaatttgagagcgttcaaagagttgagtagcagacgtaaacttgataataagtataacgactctggagatttgatcttatctgaatacttgctgactgttggaagaacatattcgttcaaggtaagcgagacagtttcctctgtcaattgcttatcatgcagccccaaagccttctggaattttaggtttgcaggtttgtataggttattaatcttttctaagacacccatatcagtcaaaaatgttataaaaacataaagcctttctgcgatctttttttctgagtactccgtgcaattcaatacattattggcccatttaccaacttcccctaaatgggaaatcggaataacagcagcaagagattcttcaattggttcttcgtcagataataataaaatatcatgtacttgtgcaaatatgcatggtctgcttaaataggatggaacatagtgttttaatggtatcgacatatcaggttcatttagttttatttttttgatgccatcatcaatagaaacaaagtctatattctctccaagttcaaagcctagggtgaggcgatcgaaggctgtagaacgactgtgcaattcgtcgatataaatctccacacctctgtttctcatagctcgggataattcaccatattttggatccatggtcaaaaataatctgaagttagggtggggtttgagaacccttggttggccatcttcttggctacattcattgatgagcagcgacccgtctatctccaatagagagttcagtctatcaagaacagaaggagaacaaagattagcattatctaagattagccaatggcccttttcaactgctttgaccaacatgccatcaaaccattcaaatttaaccgaagcttccttagtgatgatttcagtcattttttcaatattcatactcatagtttttaataggggatgcccttctaagtgcgaaaagaacctattaaaacgatttctgaaatcttggaatttctcaggtgtgacgatattattgagcaaatatttcaataagttcaaaccttccatgattgcggtagcatttggtgagagcttcatattcatcgagattatttctcttacgatatttgttaactcctcagtgatatatgatatttgtctagtcaaatcaacttgttcataaccaccaaggatatccatactatctatatcactattcatggaaaacacgtctactctgggacccaagattgaagctaaaaatcttatcgtttccgttttaccggagtttgagggcccaacaagtaccaacggccaattattgttgattgctttcaaaacagattcataaacggcgacattgcactctaatgggaaaagattctgggtaattggatagcggtaatggggatttcttagagctacctcgttgttaatttgaacatagtcttctgtaagtttgaaaaagttctctttagttgagaatttaccaaaaatatcttcaatgagaagctgtgctttattcttatcgctgatagtacggaacctctgcttaacgattatatcaacaaagtcaaacacgtccacatcttcgcaaatcgaatattggttgagtaactttagccaacgcaatgtatctctcaaattgaactcccatggtgaaccagaattaccccaaagttttcttttacagacttgatcctctaaagtagacattaacttaatcattttcgcgatgatatctggctcaatacttggatataagtgttttgcaatcaaaaggagatcatcagatgtaagcatgtcaataaataccacgctaaatcgattaacgaaagatttaggaagacctttcctaccaccaccttgatactgaggattttgagcagcaaagaccagaaaattggggtggcaggaaaacgatatgtccaactcggggatatacgcttcgcctcgatgatctaaacaggcattcaacccttctaggacggattgggaggctaaattcatttcatctaataaaacccactcacctttcttcattgctcttaaaaacggagcatcgtgccataaaaattcaccacttcgctcaccaggagcgtctgcaccgaaaagatctactagatccgtttgttcagacaaattgattcttgtaagcttatttcctgtaatattggcaagagcggtgattaaacttgttttaccaacacctggactaccttcaagtaaaattggcttgtgtacttgcatagcccgtacaacccttactaagtttgaggcagtagtgggggcggttaagttaaaggatgaagactgagcatctggaaatcttggtattttgaacattccgacttgtaattcatcctgagtcacaataatttcgttcgtttcaatttgttgtagttccaaatcgtcaccacatagtttcaatagttgtataatacattctgttctaagtgactttaaatcattttcgttttcagctaagtaagcagtgttatttgtaccaagggcgtcaataaaaaccattgaggcaccttgaattaaggcagttgacttgttctgtattttcggaaacactttattaataaattcaacccatgcaagtatgtcacgtaaagaaatgacaccacttgttgcatttccgcctcccagcttcttgccaaaccattcagagaatttcacaattggattagcaagatctttcaagtcctctaaaagccttgaggatacgatcatgtttacatcgttgaaatcttccatggatggtacccatatttcagtaaatctatttcttaacgctggagataattcttttttaccgtaatctccaccagggttcatggttgcgaagaattgaaagttttctgaagccgttacaaggctatcggatgaaccctgttctgctaacaacaaactcctttctggctccaaaacactatttagtctttcaagaacggaatcatctgctagcgatatttcatcaagtagaaaaaaatttcccgtcctcatagcttgaatcagaggcccgtcactccattcaaataaaacattcaaactatccctcagcttttgtatttccagttgaacatcttcggctatatttttattatctgacttagaatatagctgtaataactctttcaagtctacatcttggtcattagcaatattcaatgctgtttttaaggattttattagcttatattgaatttcagacctgttacgaacaggtctttgagcacctaatatgtctccagtttctgtgttttgatgggcatttagtgtgatcagttctcgacccatgaattgcgccaataattggcaaattgttgttttgccgcacccagtttcacctaccagtagtactggctccttattctttaaacaactagaaactaagacggatagtcggcgcattccttttgtccaagtaacagagccaatggcttctaaggatttatcttccagacttgcataatattggtccatatctaatttaactttcattactttttctaaagtctttttgactgtaactttttcttgtggagttctgcacctttctgcaagaagcatatagccactggcagcaagctgctcatatcccactgcgtcccttaaagcccagcggaaaagatcacgtagagttgcaaaactatttttctgttcgaacaaccttgaagcggaacgttcgatggataattggcggtatacttcaacgattttctttgcatatgatggggcaatttggcagcgctcacgtaggataatttctaattcatcttgcggaatatcgtcgaagtgcaactccagaaaacgattcctaaaagctcttgaaagaattttacggccaccgtatatcccaggtggattctgggtagcaaaaagaaggaaatcaggatgaggatgtacaacttcttgtgtttctggaataaaaagttctctgttatcgtcaagtaacctatttaaggcttctaaaacatcggttggggcaagatttaattcatccaaaacaatccaatatccttttcgtagtgcctcgactaaaacaccttccttaaacgacagctttccggtatcatcggtaacatatgtacctaaatattcctgtaaatctgtatgctcatggttatttatacggacaaacttatggcccgttatatccgcaagatatttgatcatactggtttttcccgatgaagttggaccttgaataagcacaggaaatcttttgcctgatgtagctcttaccaaattcatcatattcttttcaacaaaaggcgtaatgatatagtgagcttgttcttgaattgtattagggccctttttcatccaataatgcttaaactgaacataatctggtcctggagagggaggtgtctgtgacatgattgacttgacattttttagcctccccaatgtgaatttttctattactggcttcagaatggcctcagatttttggtccagtaaagtcaaaaaactcatacagaatccatcatacagggaacggcgtagaccgtagatatgaataatatcagtaacataaagcaatgtacgcgtcagggtacggatactaaagtgtggtttttggtttgagccatcaactatagtattgttatcggagagttttttggcttcaaggtaaagttcagcgatgtcatttcctacccattcatcgctgacgctgtactttccaatatatttatcaattatggaaagcaaatcagtaatatcacgttccggagaatgtacatatatttcggtaaatcttgatctgatacccataggtaagtctcttttaccaacatcagtagcggggttcatacaagcaaatattctaaaatcggggtgagcttttataggctcagcgtcacccttttctgaaagaagaatactacgagaatcaggctcggtgagaaggtcagaaatactttctaaggtatctgcggttgctaaattcacttcatcgagcaatagccactccccagccctgatagtctttaccaaagaaccctcgacaaaattgaagacaaacgagttttcaatagagctagactgggcctcaaacttcttcactgagtcattgaagtcagcccatttgtcaagtaacaattttttttcatgagtattgagtcttcttttcttcttctttgcattttcgttttcattttcagtgtttgtaatttttaatatgctttgagccattttgtacgcttcgttccaaagtttaacaacgttcttccattgattcttgttgaagcacctatgtagcatcttgtgaaacttctcgttcttctttaaggaaaatgtagcattaaaaagagtttcaaaattttcttgtataggaactgcaactgttttagaatttacgggtttgtacccaccaagaagatcaccagtttctgtttgttgtgaaacattgattaccgttaatttttttgctaacatcttagcaagttgttgaacgactgtagttttcccggtacccgtttcaccgactagtaaaacaggttcagtcatctgtatacaaacagaaatctgttccattagtcttaaagaatgattcgtaaatgcgaacaatgtgctgttcattgattttttttgtatatttagcttttccttaagtaatacggctcttccaattttaatgctatcatcaaggttttccaaagtgggcacatgttgggtcaaaaataacgaaatccttgaggaagcaatgtctaatgactcgccgattgcttgtataataggttccaaagctttgaattctccaatagcgccagcgaaacagtcggcggcttcggagaaaatactgtcgtagacagaagactggattagttggtcaggtttgttgatgccattgtttttgaataggatgtctaacctttcgcacagcttaattaaatctcttacagatacaactcttgtgtgtgcccccttgttcaatgaaatgaacttggtgttcatataaatacttttgacgtttttgtatgaatcgattagtttggggataaggttggtcaaaatgggaaacttttgggctaaaatgtgtgtcaaatcctcttcgctaggttcctctaattcaataacattccagattctcataccaatcatattcaagttatagatcttattggaactatccttctgatgatcttcgtttattctaacagttgatattaactggaaaccatttgcagcctttacagtctctcctctggatggaatggttagttcgcgcttttctaaaagcgataaaagtattgataaaacatctgtaggagctttatctatgtcttctataagtacccatctcccttctttgaccgcggtagcgagaacaccagctctccattcaaacgtgcctggcttgtcaccagaggtataagtaccaatcagtaacttggcatcagtttgttcacctaaatgaattttcacaatggagtcatggcaacccatatatttacttagctcattgattaaaaaggttttaccggatcccgcttttccaatgagcattattggagttgaattttgaatctttctcccgagttgacgaagagaggaaaccgttttatgagtagggacaaaggttaatgggtagaatactttgtcgtggatagtgtggaccttagggacgataacgccacagattgacgcgaccttagtactcaaatcctgaggctcaataatgaagtagctagattttttttctatagtgaaacattctggaacactgggtagtttagagaaatttgcacatctcttagcttcgttcagttcgaggaagctgtaatcaattccagaatcgccctcaaaatggcccaacaatgaatcgcgtgattttatataagtgtcgagcatatcgtttaatgttttttctcccatgtctaagtataaagataaaacctttaatgctagaaatataacaacctgattttcttgttctttggtgagtaaatccacaagttggtataaaatgtcgggttgaatgaagcgtgcaaatacttctttattgtgatatagtaacctatagtatgctaatagtattttaaacatgtcggaatccttttgtgtggatggattttgaagaatagtgatgaaatgatcattctctttatctaaatagtcttcaattaatggcattgcaacgggaaatattgtaattatacttgccaacttttcaattacaagaacgtaatctttttttttggagtcctttatccaacgtgccactatctctaaaaaaatatgtttgtaaaggaaaacatgaccagtgatggaacggctatgtagtatagttcctgctaaattgtctaaattctcagaagttgattccttgttgctaaagtggaagggcgcttcaatagcatcagagggaaaagcagaattgaagagaattaacctttggttaactacgtctaaatctaacaaaattctatcctgggacattctcagcagattataacggttttaaaaataatgtgaccgcgtaaagtagaggtaccttaaaataataagagtagaattcgatgtcaaattaactcagaggtactttgaatctttaaaataatcactttggagaggaatgtctaaagtaaagcagtaagtgatataatgttttcttttcataaagctaaatagaccttagctcatcgcttctttaaaatttttcactcgaaaaagaaaaaatacctcgtaaagggcgacaataaatgatgagtagaaaaagaaatggaataacggttcaagtgcatttaaaatcaatgccttgaatatgtgtttcagtatacattcagtttgactatatatcaagagaaagctttagtatgggaagtttgttgagaccggttgatctggtaaatcaaccgcttggattccaagaaagatataaaattttgcagaaattattcaagcagctacaaaaggcatatgcacacacaaaaggaactaatattgaccttgaaagacttgccactcgcttagaagtccatgttgctaaaaacagcttgtctggtcagagttacaagtttaacatgagcattttactgcgggatgtgcttaaatataaaggagatctctcgaagatcaaaattaatgggcgcccccttaaaggagctaagcctcatttatcctcaattggtaatgcaaactctatcactacaaaatcaaaagcgatggaagctttaaaggctctgattttggattcgaaggtcttagagaaaaatgggtatattgttaaggaaatgcaaaataaaactaatgatgacaatagtacgcaactgtatgcaccttgtttgcgttgcagctcaaatttcaaaaaaacagacatcatggaaaagactctatgtaggtatcaccctttgaaaagaatatacaacagagataccaagaaccatcagtatccatgctgtggtgaaactactgattccgtttcttttctaaggctaggatgcaagacgttttttcaccatgtgtttagaggagaatcatatgacgagttatgcaaaatttcgaagttttctagtacagatgacattgatggtgttgagaatgttctttctcttgactgtgaaatggcttttacatcattgggctatgagatgatacgtttaacaattgtggattttttcaccggcaagacactatttgatcatgtaattcagccaataggggatattgtcgatctgaattcagacttcagtggtgtccatgagattgaccgaaccaattgcccgacgtacaaggaggcacttgatgtttttttatccgaaaacttaataaataaaaatagtattcttatagggcacggactagagaacgatctgaacgtcatgaggctatttcataataaggttatagatactgcaatactttattcaagaacaaagtttaaggtttctttgaagaacttagcgtttgaagttttgagtagaaaaatccaaaatggcgagcatgatagttctcaagatgcaatagcaacgatggacgttgttaaagtcaaaataggtatttctccaagtcaaaacaagtgggaaaaataatgtgatcatattcaaagttgagcagacatatatagttattacatttcatacggttcacatgagttttattaagtaattacgttaagaaacaacatgataaaagtaatgatttcgtattgctttcctattttctgtatttaagcgaacaataataatgcaccttttcaatatctgaatattaaaatatcgtgaaattgggttcaggatgtaccaaacttgatgatagctgaagcaccataatcctatttaaagaagtacctgttatccgtcagtaattaccagaacaagttaattttaagtttaatctaaaaaagtattgcatgcggcattaaaagacaacataaaacatctaaacggtaaagtatgatcgataattctccataatagttctgttatttataatctccagcactaataaatgctatacgtatatttgtacacaatataatttcagaatttatattgctaccatgactgtctgagaattgggggaataacttgataattgttgggattccattgttcgtaaacgcaataatattaggtatatagaagatactaaatgttctctccgaggatataggaatgctcacaatggaatcgatatatttctacataatagtattgagattattcctcttttagttttatataattcattatcctattacattatcaatccttgcatttcagcttccattagacttaatgactgtttctcaatttttatgtcatcttcctggacctcatgtgatactataccagtagcatgaatactactgaatcgatgatactttagagtttcattgcaacagtttcaacacagcctggcatgaacagtggtaaaagtatttcgtccactattttcggctactataaataaatgtttttttcgcaactatgtgttcgcgaagtaacccttcgtggacatttggtcaatttgaaacaatacagagatgatcagcagttcccctgcataaggatgaaccgttttacaaagagatttatttcgttttttttttatcatcgagtgaagtatcgtgacttgtacatttgaagatacccagcgtacagcagtgtatctttatcttcctgtatgatatagataactaacatctcgaatagaaaattgtctcgcgttcgaacctaagcctttgctatcggttgaacatagaagaccgcgtgattcattttagtgcgtaagaatgctattagtacttatgtgctttatgaatgtgaatattgttacagctatgcaatggtacgatcatactctgaacgatccatttaaattatatatgtcaaacagaagagaaaggtttttttattgaagatttcacagaaaatcaatcattttgcaatattccttcgtcccagagaaggtttcggcttttacagcaacgagaatgattcttccattatttgtacctagcttccacatggatttcgataagtgtagtttcaaaccatgaacgcaattcaaaactttcaaattggtgcaatccaagaccctccctttacatttggagtcgttaactaatgagaaaatattacagcattttgcgccatttaccgtcaagtcacaaatggagacacatgcaggaataattaagtgggattcaacttgcatttgactgtcacgaagtttgaccttatattcggacagatcaattttaaaatctgggttttccaataaaacatccgagaacttgttttcaaacaacactgcagcctctctggataggtctacatgaacagtcttattctttttgttgaatattattttgcactggttagagtgtaattggaaaataagatcgtgcgaaactgtatcgatataaggcctttggtattttaacatgctccagtgtctttcaatacaatgttttaccttttttgttggaggttcatattcatcattgttgcctgaatcagtctcggttttatgaaatccagtagcggctttttcaccctcagttccattgagacaactgcttaccgctaaagattggtttccggtatgaagtgatgttaacctttcaatggttacacccttcttggagacgctatcaagagctatgcaaacttcttgacaattagttaagggattatatataatttttgcccgcactaattcctgctccaacctgttgagacggtaataacgacactcttttatcagagatgcggttctttcctcagacagttctaatttggaaccgcccagtaaagataatatatctcggaaaaattctggggaccttgcaatatatgagggtggtaataaaggtggaaagcccggcttcttatttgactcccacttctcaatttcctcataagatatgcgagaaatcgtttcaaaatagttcaaccggttcccttcttcatggaataatgattttggtaccttaaagggaacacctccaatattagtgaagtggtagtcgtattcttttatgagtttaactaacttgggtaactgaaaatataatgcgtccgcgaaaagacaggtaaattgtacttcgttcttaatatcgggaaaataaccttgtaaatgtctgtatattatgatgaacacgtcttccgatctatcaacaaatagaatcgtatttttatcgtgcgtattgaagaattgggtgaaaaaattgggcgcatccgaattcaatgtagcacctgagatctcaaatagcttttggccaatcctaatcttgaaaacttcatggtttggtaaaagctcgggggtagtttctaactcttttgtataaaccacgatctcgcccttttggccagacatctgatatgagcgtgcgtgtgagtgactttacacttgtctatccacgtcctgaagttgttcgtgttctttggatattcgtgttcaagctaataatgagcctttaaggtaatacaatttataaaccaccaccttggcctcgatctattgcgcttatgttgtctattagtaatcaagaaaagaaccctaaatcatcggcgtcccctgtggggctctcggaaaaaccggtcctgacgtcactgaaaagatttcggcacatggtcatgggaccagagaaaaattaatccgacatgtggaatatttccttccgttaaggtagtgagcgcggattttttctgatttgtaattatacggggagctctggccaaaaaggtcagtatttggtgatgaagttgaatatcatcttttgattttcttctgtatcattctttttctttttccacaccccttccggacggtattcacatattgttgagaggttaaatgaaaaataaaggggtggaaaattaaggacgagatgtaagggaaaagcataaacgaaacattatataaaggagcacaatttcctctcccttgccaattgtgcatataccgtttctttataacgaaatttcaacaaaccagaacaacacaagtactaccaataaccacaacaaaacatgtctgacttagttaacaagaaattcccagctggcgactacaaattccaatacattgctatcagccaaagtgatgctgacagtgaatcttgtaagatgccacaaacagttgaatggtccaaattaatttctgaaaacaagaaggttatcattaccggtgctccagctgctttctccccaacctgtactgtcagccatattccaggttacatcaactacttggatgaattagttaaggaaaaggaagttgaccaagtgatcgttgttactgttgacaacccgttcgctaaccaagcgtgggctaagagtttaggtgttaaggacaccacacacatcaagtttgcctccgacccaggctgtgctttcaccaaatccattggtttcgaattagccgtcggtgacggtgtttactggagtggtagatgggccatggttgttgaaaacggtatcgttacttacgctgccaaggaaaccaacccaggtaccgatgtgaccgtttcctcagtcgaaagtgtcttggctcatttgtagatgctatgtaatagacaataaaaccatgtttatataaaaaaaattcaaaatagaaaacgattctgtacaaggagtattttttttttgttctagtgtgtttatattatccttggctaagaggcactgcgtatacttcaaggtacccctgtgttttgaaaaaaaacaacagtaaaataggaactccgcgaggttcaggaacctgaaacaaaatcaataaaaacattatatgcgtttcgaacaaaattaaagaaaaagaataaatatagattaaaaaaaaaaagaagaaattaaaagaatttctactaaatcccaattgttatatatttgttaaatgccaaaaaagtttataaaaaatttagaatgtataaataataataaactaagtttacaacaacaaagcagcggcaccagccaacaaagcaccagcagctggcaaagccttagcagcagcaccagtgtaagaggtgacagagtgagttggagcagcagaggtggtgttctttggagcttcagtagaggtaactggagcagcagtagaagtaccgttctttggggcttcagtggtcaatgggcaccaggtggtgtattgagtgataacgtcatcgacggtgacggtagcggtggaaaccaaagctggggagacagtttcagaacagacgtggtcttcacaagaagtgatggtgaccaaagtggtagattcttggctgacagtagcagtggtaacgttagcagcggcagaagcgacagcggcgacagcggcgatagaagcgacagtagaaaattgcattattgatatagtgtttaagcgaatgacagaagattaatttcttggtatgttaggaaagaataaaggagaataagaataattagaacaatgtaggatggaaagaaagattatcaagcatgccgactttatatacttgaacggaggcaaaggatgcaaaattttctcacatttctttctgccgttatgttggaagtaagactcccattatcgcaatactgcaacacgaatatgcaaaatttgctgagttatcgcagatagttgttgcaaagatagcggcgtaggtggccgcgaaatggggaattccaaaacaaacggtttttttactcctgagaaatacttgtacgggataatccagggcctaccacccacgcttcgaggattggcttttatttttttttttttggtggcgttttatttctttcccgctttctgggacttgtgcggagttttgagaggggcgcgcggcaaaggattcccaaaacggaaatcagacgccaatagccagcactcaaagcagttctggacccattccgattttcccatttggttcttgcgcgtgctgattccgacacgcgcgtctataaatagcatgaagtatccgcacaccgcagcgttagtgaggtgagggtggcagcaagctaattcccgcatctggaatctgaactgccccttttggactaaccgtgtggttcatgggtgggcgaagtgcgcaacctcgaaggttttcttttgcgtgtcggattttacatccggcggtagcgcatgatgccatggctggctccagatacatcctcagggcaccagcatctataattagattggcgcaacatggctggctgcactgctgtcttcacttctttctttttccggcaatgaatgatgtatgttttgtggcaaaagggtccgcattgtacctgtttacagttgagattatcgtttttggtagcccttcattacggcataacgtattaagtttcttttattttgctttgccctggtttaaaagacaatgtcgattaaaagttaattttaatcgattgaaggaaataagaggaatagcgcaagttgttaggaaagcgttctttatctccaagactttgccctgtatataattaaacacctcaaagcgcttcgtcatggatggagattattcggcattttgacatacaggagtgccacatgcgaaagcggagtgggcgtattctctggttaccctacatggtctggcggcgttattatacgggaggatcttcgaagggaaggaaggaaaaaaaaaaagaaaaggccaacgaaaagcaaatattatctatcgtcgaaattatcatactatcttacaataagagtagtaattactttcttgtttgtatagtggaagaggaatttgcgataataatagcaaaagtaactaatctctaacaagaaaccttatttattttctctttcttctatattggtaaatactagactcgaaaaaaaggaacaaagggaaaacagggaaaactacaactatcgtatataataatgaccactaacgaggaattcattaggacacagatattcggtacagttttcgagatcacaaatagatacaatgatttaaaccccgttgggatgggggcatttgggttggtttgctcagccacggacactttgacatctcagccagttgccattaagaaaatcatgaaacctttttccactgcagtgctggccaaaaggacatatcgtgaactaaaactactaaaacatctaagacacgagaacttgatttgccttcaggacatatttctttctccattggaagatatatattttgtcacggaattacaaggaacagatttacatagactcttgcaaacaagacccttggaaaagcaatttgttcagtatttcctataccaaattctaaggggtttaaaatacgttcactccgcgggcgtcattcatagagatttgaaaccgagcaacattctgattaatgaaaactgtgatttgaagatttgcgatttcggtctagcaagaattcaagaccctcaaatgacaggctatgtttccactagatactacagggcacctgaaatcatgctaacgtggcaaaaatatgacgtcgaggtcgacatttggtccgctggttgtatttttgccgaaatgattgaaggtaagcctttgttccctgggaaagatcatgttcaccaattttcgatcatcactgacttgttgggatctccgccaaaggatgtgataaatactatttgttccgaaaatactctaaaatttgttacttcgttaccacacagagatccaattccattttctgaaagatttaaaacagtcgaacctgatgccgtagaccttttggaaaaaatgctggtttttgatcctaagaagagaatcactgcggcggatgccttggctcatccttattcggctccttaccacgatccaacggatgaaccagtagccgatgccaagttcgattggcactttaatgacgctgatctgcctgtcgatacctggcgtgttatgatgtactcagaaatcctagacttccataagattggtggcagtgatggacagattgatatatctgccacgtttgatgaccaagttgctgcagccaccgctgccgcggcgcaggcacaggctcaggctcaggctcaagttcagttaaacatggctgcgcattcgcataatggcgctggcactactggaaatgatcactcagatatagctggtggaaacaaagtcagcgatcatgtagctgcaaatgacaccattacggactacggtaaccaggccatacagtacgctaatgagttccaacagtaaacgtgtttttttaatgtccctaaccactcattcttacttctttttgatgtttcttttttttatggtactcataaaagtatttacgtatatagttgtatagaggaaacaaaaaaaaaaagataaaactcaattacaaagtaaagtggacgtatttcgatcatgatttttttctgttttaaccgcattggattttcttgtaaaactggaagaaaaaggaaactaaaaagtcaagaaagacctttttaagactccaagaaccgtcacttatggcgtattgtttgtttatcagcacttctatcttcgataaaggtttgtctgtcttatattgtttacatttcaagtctaattctgtgcttttaccgaagaggaattttcataaatacggagaaaatataaaaaaaaagtaaatacagaaaatagaacagttgaagcagaaaaagagaacttgctaaatagctgtctcacccagacaagcgtatacttaccacatttagtcttttgcaatctcattcttgttgaagataactattacattcacggactgtggcagaaacttctccttaagaaattaggaactcataaaaggaatcagcagctctatgtaatatcaaaatcttttctattttttgtatttatgctctcattcattaattctaacggagctatttattataaacagtgaagatataaaccatatgtctaatagaacaaatttcaaaaagtcttcaatttcgtggatgtgggaatgcatttattaaaaataatgaatggcaacatacgacaccaaaataggaacactttcagtactatacagaactacggatcttagtttattgagttttgagaaataggttgatatggagacaatttcttagcgttattagaggttataagtatacagaataacctacgagtagtcctcaagaagataagactctgcaaaaggtatcaataattttacttaatcatagcactatttcttctttcgctttgtacagcagctcatatattccattacattatcaattcttacatcgtagcataaaacactaagattcaaaaatagaaaactgttgtatctcaaaatgagatacgtcagtatgacaatacgtcatcctaaacgttcataaaacacatatgaaacaaccttataacaaaacgaacaacatgagacaaaacccgtccttccctagctgaactacccaaaagtataaatgcctgaacaattagtttagatccgagattccgcgcttccaccacttagtatgattcatattttatataatatataagataagtaacatccgtgagttaatctgataaaccgttttgacaactggtaacttccctaagactgtttatattaggattgtcaagacactccggtattactcgagcccgtaataaaacaaaaacaataaatcttgttcctcgtggcccaatggtcacggcgtctggctacgaaccagaagattccaggttcaagtcctggcggggaagatttttttgctccgacaattatgtcgctacccttcagttttgttgaaaatgatgcttttatcgttaactttacttatctttattgtttgcaagattactattaatattaaagagggtctagcaaggatactgcgattgtttctaaatatttcaactttctacgttattcatctttaggaagctaaaaagcattcaaaagattactatgaagttaatctttaaacatagtttgatgagcgtctatgcaaatagaataacttcaaaaaattttctattccatttttggaaagccccaaaaagctatattctataatttctgaatcttattgtgcttgtggaggtcaccccagttttctataaattattattcagctattatcccaatacgactaaaggtattgagattcacggatattttttcccctgcaactttcacaactggagggctctgtttcttgattttctttttgtcatataaacatatcttagcgcgattgctaacaaatagtatagatatcataatttttcctcatcctgcacacaattacctatagcagcgtcattcgcaccgccctcctcattggattttttaactgtatttctcgttttagatgagtcttcaacatttctatcgttttcataaatatcagttttactgtcggaatttttattgctctcaggaccaccttcaatatctttatctgcaacggtttcgtcctcattaaaattttctgcattaccctcaaaattctgttcattttctttatcatgatcagtgttaatgttcgtaacgtctgtaaaaccattgctaaaatcttgactgtcttccttatcgccattttcatcgccctcaccgtcatcgccattttcatcgccctcaccgtcatcgccattttcatcgccctcaccgtcatcgtcatcgtcatcgtcctcactatcatcgtcatcaccaccatcatcatcatcatcctcagagtcctcatcagtatcatcatcttcattgtcctcactatttcccacctcttcactttgttgatctgtctccgcatcaggtttataatgtaaacccaagcccatcatagctttctgtatcgcgttcgatgttttacttctgtttttgagatcttctgtggattcagtaacatcttcattagcagtattctttggtttattgaaatattccttccatgaattccataagttggctgctggcttgtctgtattctttccaggatttacagaaatttgggaaacagacttttttgactcgatgctttcctggtctttgatatcctcctcgctttgatgaccatttttattgcttgaagagttgctagagcttctttttaaattatgaaatgtggccaaaaatcgttgctgtaatagagacagagtgtcggcaccgttatatatatgcttcggaggaaacaagtcgaacaatctatcatctgttcttgagttgaatatcagaaaattttgagtctctttccaactctgaacccaattcaaattgaataaatgaacgggattggaatttagcatatcctcaggtatagtcttcaaagcttgatcattctctttatgcaggtccaaataatcacttaatttaacactggaaagtaaccccgttaaatagtcctcgaattgccacctaatgaaatcctcactgccttcaaattgagagttttttggagtttcatcatcattttcgttccatgtgtctgatacaattccagatatagattcaatccattttttatcatgacttgacaattggaggacggggttcaaagtcttgtccagaatatctacagtggaattgtctgtattgacaaatatgtggcacagttcctccttttgttcagcaagcaatgtgttggaacttccaatcataaaaaacaaagtacgttctgaccgtatgtcattcatttgctgcagtggagtatagggtgaaaatagtccacctttttcgaaaatcggtaatggaaaacctaagaatctcaacactgattctcgattgcttgatttaaacgagtccacaacatttaatttcgaaatatcctgaaacaactgaggactgccagaatcctgcaaatttgacatcaagtccggaattaagctgatcagaccgaactgtaaattacacaaagcttccacgtcgttgccgtaaactataatttttttttcaagcataattgctttcaataagactaaagcgtttctcttaaaatcatgtagtatctttctcagacataacccaatataaagacgattttcggcatttctgaccaatgatgcaggcgtgtaaatcgacttcaggttttcgtataaagactggattatcttcctgtccccaaaatcatgctgcaagaaaaaagcattagtcacaatactaagtttgtccttgatttgaccgaagattggttgccttgagatgactacaattgccttctgtacagtagatcgtgttacatccttatctttagtgaccaattcatcactctttatctgtctcgagcaagatatggcaaacaaagtcgtgttgtcattgatgctatcatcactcagatcagttgccccgttgggagggctcctttgtcttctttcatcatatagtaatgtgaaataagtaaatgtttcttcaaacgagtgagaaccatcaggaagggcctggaagggtaaatttggccatagttctgcactttgggtgccctcaggtaagccataccagtattctatttcagggcctcttttgtgatgaaagtccacaaggcagataccgaagatgactgcttcctcgtgttcatccattattttgacaacaaggttgcagcgaggcagaatgtatatgttagtttgatatggtcttcctgcttggattcctttaaggcttcaaaattttcttgaaaaggaaacttcgtgaatgagctgtaaggatgcttgatcgggccgtacattcttatgcaagatccattattgactgctctctgttgggttagcttccatatcttccgttacccgttcgtataatcattacccgacggacaagcatcatttcagcggctatttttgctaggcaaacctcctaagcaatgatacttctcaaacgttcaatggaagtaatagaagttcaacttaccccattaataatccacacattagaaggttgggacaataaaaataaaaagcattaattagtgtaaactttgctcccaaatgcaagtctaaggtaagttctttggttcatggagtttttgcagtgtaatctcacgtgcactagactgagtaaagcgaacctgagttcaagaaataatgattcacctatgacatatagtccaactatacaagcaatgaacccttacggattgaagtcattcaatgttcaatgtttgttgtaataagaaatattactagaaaaagattttttctttcggcggcgttttcccgcttttcttaaacaatctgcagttttaacatcgaattcacgaatatttgttcgctaaagaaataacacagaagatgaaatgaagaacatacattgagggcgacgaatatatatgacttataaatacaattgctgtgatgatggatcaggaaccaccgttggttcagtggtacgatttgataacgtcaccttgttaatcgatcccggttggaatccatctaaagtatcgtatgagcaatgcatcaagtactgggaaaaagtgataccggaaattgatgtaataatactatcacaaccaacaattgaatgtttaggtgctcattcccttctgtactataattttacctcgcatttcatatccagaattcaagtttacgcaactcttcctgttatcaacttagggagagtttccaccatagattcatatgcatctgcaggtgttataggtccatatgacacaaataaactcgatcttgaagatattgagatatcttttgatcatattgtacctttgaagtactcgcaattggtagatctacgatcaagatacgatggattgactttactggcgtacaatgctggtgtgtgtccaggtggttctatttggtgcattagcacatactcagagaaattggtttatgcaaagcgatggaaccacactagagataacatactaaatgctgcttctatattggacgccactggtaagcccttatcaactttgatgaggccctctgcaataattactactttggacaggtttggctcctctcaaccgtttaaaaaacgttcaaaaatctttaaagatacattaaagaaaggtttgagttcggatgggtccgttataataccggtagatatgagtggcaaatttctggacctgttcacacaagttcatgagttattatttgaaagcacaaagatcaatgcgcacacacaagtacctgtacttattctgtcttacgcgagaggaagaactctaacatatgccaaatcaatgctcgagtggctgtccccttcactacttaagacatgggaaaacagaaataatacttctccatttgaaattggatcacggatcaaaatcatcgcaccaaacgaattgagtaaatatcctggttcaaagatttgcttcgtatctgaggtaggagctttgattaatgaagtgataattaaagttggtaattctgagaagacaaccttgattttgaccaagccgagctttgaatgtgcgtcgtctttagacaagatactagaaattgttgaacaagatgaaagaaattggaaaacatttcctgaagatggtaaatcattcctctgcgataattacatttcaatagacaccataaaagaagaacccttgagtaaagaggaaacagaggcgtttaaagtacagcttaaagaaaagaaaagggacagaaataagaaaattctactggtgaaaagagagtctaagaaactggctaacggcaacgcaatcatagatgataccaacggagagagggcaatgagaaatcaagacattttagtggaaaacgtcaatggagtaccaccgattgatcatattatggggggtgacgaagatgatgatgaagaggaagaaaacgacaatttgttgaatttactcaaggataactctgagaaatcagcagcgaaaaaaaatacggaagttcctgtagacattataattcaaccaagtgccgcttcaaaacataaaatgttcccatttaaccccgctaaaatcaagaaagatgattatggtactgttgtagattttacgatgtttttacctgatgattctgacaatgttaatcaaaatagcaggaaaagacctctcaaagacggtgctaaaaccacgagccctgtaaacgaagaagataacaaaaatgaagaagaagatggttataatatgagtgatccaattagcaaaaggagcaaacaccgtgcttctcgttactcgggattttctggaaccggagaagcagaaaattttgataaccttgactatttaaagatagacaaaacgctctccaaaagaacaatctcaactgtaaatgtccaattgaaatgctccgtagtaatcctaaatttacagagtttagttgatcaaaggtctgcatctattatatggccatcgctaaaatctagaaaaatagttctttccgcccccaaacagattcaaaatgaagaaattacggcaaaacttatcaagaaaaatattgaagtggtcaacatgccattaaataagatagtggaattcagtacaacaataaagaccctggatatctccattgactccaacctcgataaccttttgaaatggcaacgtatcagtgatagttatacagttgccactgtcgttggcaggctggttaaggagagcctaccgcaagtgaacaatcatcaaaaaacagcgtcaaggagtaaactagtcttgaaaccattacacggttcatctaggagccataaaacaggtgcgttgtcaatcggtgacgttaggttagcacaattaaagaaacttctcacagagaaaaactacattgcagaatttaaaggggaaggtacacttgtcataaatgaaaaagtagcagtccgcaaaatcaatgatgcagaaactattatcgatggtacgccttccgaactttttgatactgtcaaaaaattggttacggatatgttagcaaaaatctagccttcttgtatacagcacaaataaaaggttcaatttacgttcgtggactgcccacaaaacagtatgtgacataaattgctgtgtatctcgcaccgctattatctgtatataacattctaactcacttttaacgatattagcattattgatttctttctttttctgctgaatttcaccaagcggaaattttcaaagcagaattttttccctaatttgctacaagtgctattctatcccacaataaaaggaaattgttgatgagttttagaaggattaactctagatactttgaaaatagaaaaggaagcagtatggaagaaaaaaaagcaaaggttcctccaaacgtcaacctttcgttatggagaaagaacacggtagaaagcgatgtccatcgattcaattctcttccatcaaaaattagtggggccctaactagggaacaaatatactcctatcaagtcatgtttaggattcaagaaattaccatcaaactgcgtacgaacgattttgtgcccccctccaggaaaaataggtcaccttctccgccaccagtttatgatgcccaaggtaaaagaacgaatacccgtgagcagaggtatagaaagaaactagaggatgaacgtattaaacttgttgagatagccctaaagaccatcccttacttcgttcctccggatgattacaagagacctaccaaatttcaggacaagtattatatcccggtggatcagtatcctgatgtcaattttgttggtttattattaggtcctcgtggacgtacgttaagaaagctgcaagaagattcgaattgtaagattgcaattagaggaagaggttcagtcaaagaaggtaagaatgcaagtgacttacctccaggcgccatgaactttgaggaccccttgcactgtttaattatcgcagactcggaagacaagatccaaaaaggtataaaagtttgtcaaaacattgttatcaaagcggtgacatctccggaaggccagaatgacttgaaacgaggacaactgagagaattggcggaacttaatggtactttaagagaagataacaggccctgtccaatctgtggtttaaaagatcataaaaggtacgattgtccaaacagaaaaatcccaaatatacagggcattgtttgcaaaatatgtggacaaactggacatttcagtagagactgtaactcatcgtctcaaagaatgagccgttttgacagaaacgccacggtaaataattctgcgccaatacagagcaatgacgtacactataatagcaatactcatccaattcaagcaccaaaaagatctcgttatgacaataactcgacggaacctcctttaaaatttccggcttcttcacgttatgcaccatcaccttcacctcctgcgtcacatatttcgaggcaagctcaaaacgtgacgcctacaccccctcccggcctaacatcaagtagctttagttccggagttccaggaatcgcccctcccccattacaaagccctccagagtcggaacaaccgaaattttcgctacctccacctcccggtatgactacggtacaatcctcaattgcacctcctcctggcctaagcggtcctccagggttttctaataacatgggcaatgacattaacaaacctacacctccgggactgcaagggcctcccggattataatacactcccattatacaatatctgcatttttttttatttgtgttgaaggtatgtagtctctattttgcatagttcctttttttgttggttttttgccttcctggttattattaacttttgatatttaatttacttactagcttattctactactgtttagtttctacggcctgaactacaatgacaaaaatattatttcacgatacccttacctttattcaaagtgcctgttcctgtttccattttttggctagttccaagaactttgatggttttggcttgtcatcatcgatatcatcaggaaaaatgtaatccacgaattcttcttccacaccgttctgtaacctcacttttttgattactttagggaatcttttcttgacggtttcttgatcgagttcagtaccgtaagtttcttcatagtcttttagcgcttccaaaatagacagtctcccttgtttatcatccttctccttgaaaaaaactatcgcctcttcaaaaacttttcttgcctccaatttattctcatcggtaatttcaaactctatgtcttcatccacattttcgctttgcagttttgctaaatctaatagttgttgctccgtcggggttgaagtttgatacatggcgaattcgatccagctttggggggaatattggttgagctccaaatatcttctataaagcttccttgccttttcaaattcttgtgattctgtctcaaatgttatgtatttttgaagtaatacaattttagcctcctttgttaagaaatcagaattttcatctagtgcaattgtatatatacctcttactctatcccaatctcctaaattttcttctagttctccatattgtgaccaaatttgtagatcagagggctgaaattcaataaatttctcatatatttttctcacacgatcaaattccttcaacttcacttccaactcgatatatcctttgaaagttttagccttaggacataaaccgattgctttacccaaaatttttctcgccttcggtacatcatcatgtcgtatcagaaatttagcatacattagccatattttggaaaaagtgaaatgtttatgagggatgatgtcgtcaattaacctctgaaaaagttcttcttctaaaagcgaattttccaattctaactcaacatagcatatatatctcatccacagataaatataccttttccactgaacattttttgatagttcttttggtcggctgtccacaatagctttctcgaaagtttgcattatttgtttggggaaactttctgaaatgagatccaagtacagccaccaggtgtcataatcataggcgttattactcaatattgtttcatactccattttccttttatagctaatagtttcttctattgagtttatgtcaccaaactgcttttcaaaatccaacagtcctgccttgagcaattgattggagggccatttttctatagcaatttgataaagagcactagatctttcgtattcttgctgcgcagcttcccaatgagcaaatgaatttactaattttgcaacctccatatcagaccaaatctgtaaattttggaggttagctactgtgtctatcgctaaagaatacacacttctcgtaaattcagtattaccatgtctattttcaaacctcacccactttagccatgtctgcatttgcgggtgagccatgacgtattttgagtaaatctctcttacaccgttccagtttttctgtcttatttcaaaatccacgaaagaattccatgcattaacccctggctccaaggagcaccatttggtgtacagtgatcgtacaatttcaacgttgtttaacgactcttcgacaatgagatacttgtaccataacttgtctactctgggcaacgtactaatagctctgttcataagattcctagcatggttaatacatttgactttcagctcagcatcaatgtatcgtatccaaagggggatgaatgaactatctactaataatgctctttcaaagatagatctggcgcgcctcatgtcgtgttgttcgatttcgaattgcgcataacgaatccattgtcccatatccagtcggtttctcttcaaataaccctcatattctgttctcttccttcgttgatactctcgaagttcctccaagtctaatatatcaatattagtcgatcctcttgctttttgccccttcttgtacacatcccgcagaatctgctccgcagaaacatgcgtatcaacggctgttggctctaaagtgtccatgctggcaatagtagagtacttttagctcaagtttgtctatctattatgaacttgcataatcaatgagtctcatcaccccaactatttggcaccaaggtttttaattttctatcgcgtcttacggatgtatataaattatttaaccaagtataatagcggttaaattgaactcgcaatattaggaaaagagctatgatgataagctcttcttgataaatgaagccaagtcttctaattcatctggaactgtagaatgggccatacctttgtatactttaaattcataattttgtatctcacagctatcttgatagaactgttttgcctttatacctagtccaataggaactactggatccatgtcaccatgcccatgaaaaattggtgtctttacattaatgccattcttatgttgtttcagaattcctgggatggaacaaaatcccgacagagctactataccaccgattttccatggtaaagtaactgatgttgcgagagctaatgcggcaccctgagagaaacctccgataataatctgctccggtttaattcctttatcaatttcttgcttaaccgtcttttctatggaattcaaagaattcataaaaccgtcactgtcaactttggaaaaactaggatcccattccaagatgtcaaaccaagcaggcatcaatgcaccgccgtttgctgtcacatgaagctctggagcattaggaaaaacaaaattagtatgctggaaagcggcagggtctctctgttgtaaatactgagctaaaaatccccatcccgaacctgtatcacctaatccatgcaagaatatgatagtttggcgtgctggctgaatttttgctgcaactctaagtccattcatattcgatagcgctcaaatgggcaaatatagtgtatgtgttcttattttcgttctcttttgctaacatttttatttcatacagaagccatttttccctagaataggcgttctgaaaagaaggaaatatgaaagtaaaggctacaaaactaaggataaaacaacgaaggaaaaataaggggctcaatataagcagattagatattatcagagcagaaatggatgtggtaccatctccgggtttaccagaaaaagtaaacgaaaaaagcaaaaatattcccttacctgaaggaattaaccttttatcatcaaaggagataatcgatctaattcaaacccacagacaccaattagagttatacgtcacaaaattcaatcccttaacggactttgctggaaagattcatgcattcagagatcaatttaaacaattggaagaaaattttgaagatttacatgagcaaaaagataaggtccaagccttattagaaaactgtaggattttagaatccaaatatgtagctagctggcaagattaccattccgaattttcaaaaaaatatggtgacatagcattaaaaaagaaattagaacaaaacacaaagaaacttgatgaggagagttcacagctagaaactaccacaaggtccattgactcagccgatgacctggatcagttcatcaaaaattatctggacatacgaacacaatatcacttgaggagagagaaactggcgacctgggataaacaaggtaatttgaaatactagttcagcagctaccgccattatcaatatgtacgtatatagactatactttatagattattctagatgccaaacgaattattagaatattaaagcctttgattataggccatatcccaggtaaatagtatactaggaatgagaaaaaaaaatgtgaataaatggtaacctattcttagtgggtaagataaactattgtgaagtaaaaatgaagaccgccaacgtaacaataaaaaattaataataaaaaaaaactttgcccaagcgagagcaacgatttccgccagaaactccaactggcttggagatgtgaatgtctaaactttgtgcaacggttttcagatgaatgcaaaaagaagagaaattaatgtgaggggtaaagatggaactatatgatcaccaacatttcttttacttgatgtagaagtggcggatgcagtactggtcgtcaggttaccgctaaaggaagcagtttgtgaggaatttacagtaaatatgttaccaccggtaacaatagatgcacttgtggaccaagtgtttgtatagcctggtgcctttacggcgcttggaacagaggatgtaataatttcgatattttcgcttgtggtattatagcgagcttgtgccatggatatttcaagattctccaaatcataaaccacgtacgcgttagtcaaaaatgaatcacccaaaatggtacctgtgtcatcactcgttgggataatacctaaaagacatgtagtgccagtactcaagataaaactcgaaagtggtgcattgatgtgaaaaccaccaaaatcgaacactatttccatactatcatcagatggacagtccaatacgtaataccctatcctggaagagtattgcgcacctagttcagtagcgatcatacttaccactgtttgaggtaaataagtcaaagtagtaccggaatccaacaaagcaggtattttagtggtagtcaaggtcttgttactactcccagaatcactaataccgataccattaatagtgacatcaaattgaatgggagagctaaatccactagcactcagagtgtttacgatggggattgtgtataaggtgccggtatatttactgtggtccacggctccgaacaaaatggtgccatgcatagcgtccgagtcgttcaaatacaaagaatatgtgttgcttttgatagcaccagaatttttcaatacaatggggaagttgtcgtatttataagcttttccactatgagacgcagtagagccagaataagtgacttctaattcgggcaaaccaatacctaacacacccatagtagaattcgtttcattggcaacggcaaaagacaacccggtaacgttcaagtcgcttaaatccaaaacatccgtaccaaaagtaccggaggcaaaagtcccatcaccgtagctaatactgaaataggtgttgtttgatctaaatgtagaagagcccgaagtggaaaatgtcccgtattgttgacagtccatggtggcttccgaagcaggcacggattgagttgccgtacctgaaccgcctcctaagcccgtagcagtggggccaatggcactgcccgttcccgtcaaccagccaaatgggtttatatcattaatcaaagatccgccgcttgacgaatcatcacgtttgtcaataacacgtctccggctactacccatactgttcgaagaacagtatggattatccgagcccataatccatagatcagaggagcctgtgtccaccaggaccgttacgttctgtggtggcgtgcccacttccaagtccaccgaatagaaactttgctggttggtaattataatttcttcataaccgtcagccctcttcaataggcgtacttccggttttttgtcgcttcccacattttctagcgagtccccgtaaagcttatgaaagggcaacttgacgaacttggaattcgagtcgtcgtcgcgcttgtttgctgctggtattatcttaccgagaacctgcgatgcaaagagtgacgaaaggaccgcagatcttacagttttcagtttcatatgtggtaggtaatattatactatatgcttggtgttcaccttatctttttattacgctatgtattttaatatacagaaaagccaattgcgttcttcttaataaccgtccaattgcggaaataggaacaaatgcaaaaagaaggaaaaaagtaaatcctctttgacacccttttcttaagtagtcggatttccctgtttctccataaataagtccacgaatttttttatgaaacctcaattttttcggacacatcagtgaaacgaaaactactcatggcgcagtataaaaggagcgaaaagccactcagttgagtggacgagggaggtgaggtggtgacagaaaagaggaggaaggaggcagtgctatgtgagggtgtcttggctgcatgcaaggtctgacgatctaattgacgcgtcagaacgtgtgttttaggaatattcttatttaagtatgcttttcctcttgaaatcgcgcaaagaaggaaaggaaaaagtgtctatatatagtgtctattgtttttttttacgaaaagaaaacggaaaggatgagtaaggaggggactagcagtaaacccaaggtagagcgtatactggaagcggagttggtagcagccctctggagtgccctcttgcttttatgagtcgactttgcagtagtggtagagtttgtcttcttggtggtggttgacctcgtagtggtggcagtactggtgccattgaaagtgcgcacggtggtaaaaatattaccaccggacgtggcggaggcgtagttagaccaagtgttgttgtaactgggggcccttattgcactgggaacggtagatttgatgacttcgacgttctctttccccgtgccatacttggcttgagctagggaaatctcgtagttatccaaatcgtagaccacgtaggcgtttctcaagaaggaatcaccaaggatagcggtggcgttgcccgcttgtggaattattgccaagacacaggtccccacactggtctgcatagtaaagtcggatagaggagcgttgatacggaagccaccgaagtcgaaggccacgctggttttgttgtcgctcgagggacacgtgtactcataataacccaatgtcttggaatacgaggcattcaagctctttgctagcaaagccactgcctgggagggcagatatgttagcgttgtgcctgaatcgagtagggctgggagcttggtggtggtcaatgtgatgttgcgcttgtcggtttgcagtcctaagccctgtaaagtgacatcgaacgccaccgggtgctgataaccctgcgacttataaagattaaccaacgggatagtgtacagttggccctcgtacttgctgtgatctacagcgccgaagaggatgctgccggaggactgtgactcgtcatttaggaaaagagagtatgcggttgcatcgatggctccagaatgttttaggaacaggggaaagttatcatactcgtagcttctcttgtccataatagcgacttttccagaataggtgacttcaagcgtggaaaggccgatcccgagcacaccaaaggttgagttagattcgttggccacggcaaacgatagaccactgaggtctaattcgttgtactttaatttatcttgaccaaatgcaccttctgcataggttccgtcaccgtaagcggcataaaaaggcgaggacttgttggctttgaacgtggacgacttggtcttgtcgaacacgccatactggtcacagtccatcacagaaccgcagtaggggtttcccttgccaggaacccataagtcagctgagcctgtgtctaacagcacagtgaggttttgtgaaggtgtaccaatggctagctcaacagaataaaagctttgctcgttagctagtacaaatttttcatggccgttcgatctcttgctgagttcaccattgtcgccgttctttttttttgtgaagggaatcttgacgtatttcccatcgggaagtactctaccgaatgccggactagttaagactgctaatgtagccactgccgccaattgaagtttcatttttcaatgccgagtaattttgctctatttatcctatataaattcacaaacacacaagttagcggctacagatattcatatataatatatatacgtacatatatatattattatggcgtccagccttcgaccacacaagtttccttttgaggcttatagttctaagttcttcgctatttttaatttcttttccgcgaatagtaatccgatcgccaataatttctactacaaaggaagcgcgaaaaaaataagagatattttcgctatttcttttgcctgtacatggcccggccccaaatatccgattctcgtttctgtgccggattccactaccacgagactcagagccctataagccaggaggccaaaaagcaatctccattaccaacaatatcgcggtagtgaagatttgtatgtatattgaatgccaagacaaaatggtggccaattctgccattccgtcataagggatattgaattttgcttatttcatcaccccacgccattgttttgtcccgcccggaaaaactctgccaaaaaaagagtacatttctggcccatctccgcactaattcccctttcctttaaaatacgctgcttataggcgtcgaatggagaaaaggtagtgagtgattcctcaccctccactcagacgtttctgatatacaattggggaaaggggttcacacacagcaagccggtatgttacaattgtatttagataagtttttcgtttgaatgcgttgaaaattacttgcgctagcttcagctgatgtgccatgtaacgccgttctatccacgctaacttcaatagacttcaatagaaagcaaatagttatataatttttcatggacggtccagagaatgccacaaaagtgcggccatagaatgaagactgtatgaaagagcgccattgtccccacgtgtaactggggcgaagggcaggaattctgagagcaaactttgcttccagcattatgtaaaaaatcgaagcgcacaatcggacgcaaacatctgtgtagacgtagagaaacatgcagttttgatatagacgattcatgttgatgacgagcaaggcaatttcgagatttgactactgaagaatttctgtttaggagccgcttttgcattatcattgccctattacgagcccagttaatgttggttcgcctagtcttgggattgggatatagggttaggacgagtcgatcttagtggtacaaaggaacctctcatcatcctgagtccattgtctgcgttttttcttgaagctgaatataatgttgtaatttgctcgttctagcaacttcagcgaagccagtcttctaatgactccgctgttcccagaaagtgtgagcacttacatatatgaatacagcactatctggagaagtggcgcgctcttaattaaaatgatgcagcgtgttatcacatcttgcgttaccgggccttgcaaaaattgctatgtttttcttgtgcttggtattgcttcgtggagatatatattctcatatcaggacggaattttacaaagtgagaactctaaatggtgtagtaaagagaagaaaaaaaaatgctcagcgatttaccctcattacaaccaccgagattcactaggaaacggagctgtccctcggaatttattgtcaacatatcatccaatgttaatgtagaatgagttaccgtctgttacttttgggacggtttttgcactaagaacagacgagtttacggttatcctcaacaagcaagcaagtatttgctaatctagatgccattccgaatcattactcatacgttactattgagagatgttttacaatagatgagaagaatacaatgtccagagctcctggtatgctagagtgcatattccaggtcttattcgaatcatatcataccgtccatttcaacaatggtgaaatgtggtccacatatatcagaaatcttaacatttagtgaggagagccagtagaaaaatgtgcgcaagcggaaagaagtcattcacagacacgtttaacaaaacaccaccacagcagctttgtctcttgattctgatcagtttgccatcgaagaagcaaaattgtggtgttatttttttcaaacaaaacttttttggcaacagcagttttcttctggatatttgtactttatcatccaaccgatgaaagctggtttcctgtcaacctacatttaaatggcccgtacttcttcaaaaccgctagataagcaaattaacccaacttttgagcgtcctaaattccccttggctcagaagactcgttaatatgggaagtttaagtcctaccatataatcaaattggaagctttctgtgttcgaatggctattctaaccgctgggctattaatcagaggggaagtgaaatgaccgagacgtattatacgtcatgttgacatcaacaatttaaggaaaaaaataaaaaaaagcaatgaaaaagggtttttttaagttgaagacccttttcaaatatatgttgctttgaattgtatctaccgtctcgtttcttctgctttaccgtttttttttgccttctttagatatgtcttttatgcttgaaaggtccggctttaatgcattcatctaaacgtagtattcctatttttgaactgctaccaatccaccatgactttactatgaaggacattattagtgaacagcttcaaaaaaataaacttttcaagtcattaagatatatcttgttgcagcgtaagatgttggtgttcagtgcattctgtacaaaaatccgtgtaataccaagtcatcctcagtttacaaagcttgctagtttcctgcagtttggaatgaaccattaaagacgctaatcttcggatagagatcagctccttgatactgtataatccctatccacttgaattcctgttgcatcccagttctataggcatcacctactgcatcacctacttgtataatcctcgagcaggtatgctagctctgcgtcagtccttgcgatacacaactaatggaatatcttatgggtcaatcaaaaccattcttctagaacgccgagtttccagttttgggatttaagtaatacattaggtgcctgtcacgcaatccgtccgctgtatttctccgcatagaggatttcagtacgagagagtgaagagtcaaactaacgcaacgtagtagtggctttggacattgaaaagaatagtctagtctgccaagcatgggagaaattttagaactaactaataagaatttcatgagccacttgaaaaaggacataacttcgcaagaatccttgaaaagtagaattgaggataaaaatggtgatgtcgctagcccgaaagaggataactatcctctattgaatgaaacagcggcatggccagatggggtgattacctctgaagaaggatgttcatcttcaggtgagaaagagaattcaggcttatgttcagaagaaagttcagaagaagatccagaagaagctgaagaggaatctgcaagggcttttggagagttagttgcagtcttgcgggacaaagacataccactgaatgtattggacgaacctcagatgaaagattggcttgaaaaatacaccggtgtttatagaagctcttggcatggttgattatgaagaaaattccataattttgcgaggtgggagaatactcttgggaaagtgttgagaacaaaaacgccactaaaaacagcaggattattaaaaagtaaaaaaaaaaaattccttttcaagcaggcaaacaatgggttatttgaatggagaagtatgctactatttctgcatgttgtggatctaaggcgatgtgggcctagattctttcctttttttgtttttaccttaattatcttacgttgttctttccgtcagttttacacctgacatgggacaagagaacaaattgtgaaataagttcaagcctctgttgacatttattgatgtatctatttctttgagggttaattaaagataacaaattgctttcttccgctaatttgagcctattgaatttactgggaaatgccaacgtggtcagacatcaattcaagaagtttagttctcagagagtgtaacttgcctgtttggtcgctgcagtgaaactgccattagctctttagaacaacgttctaactatacgaggaccatattacgtaaatcaacaaacctcaagaattagtgtcatattttctcgcagatattactactgacattcagtcagctatatccattatgcatgagcgaaaaaaaagtgcatacaaaaaagcttatttattggacttaataaacgaaactatgtagtgccgaaccttcggatactgatcattggagtgatttgataaagtttctgcagaattctgggaaatgaaggaaatgacgtagcgaggccttcatgcaacactagttgaaattgaaaaaaaaaaaaaccttataagctatctttcctatacgtcctctatcgactatataacccaagcagctgtttcatattttttgcaagaataacctccaaatattcctggcagcttgtatgccattgttatccagctcctggcactgtctttcgtatctattaaactcttcaagggtaagcttgtcttgagacttcaaaagccccttctgagcgacatcactattgaattcagggtgtccttgaaacgtcagcactctgttttgcctgtaaaatccttggttttgacatttttcacttgacgcccaattttggtatccctctgggacatcgaacacgcagtcactgtgcacttcagaaagatttaattcttgagcaccaaataacttttgacccacagagttcagttttagtgacacaaccccaccttcaaaccctttcggattccgtccaactgaacttcctagagcagccgcgataacttgatgaccaaaacatattccagctacgggcggatattcagtcttgctagttagcatctcatttaagaaacttcttaatttcataatccattcaatttcattatcaaatgaatcatattttgaaccagtgatgtatatgcctaaatactcatctttctgaagatctgacaattgagggaacacgtttttttgtacgtggaacacttcatattcgacatcttctgcgatacattccaatttcctggtctgttctaatagcttgatagccatatcaacaaaattgccccatggtttactccattcgttatcttcatctgtataaagaatagctattttttttactgtcattatgatgttttcttagtatttttttgatataattcaattctaatatatgttaatgcataattttcagagctatagcggtatatatttcaaactttctcaattatctatgtgaaattataaaccttatctgtcttttcttctgtacacctcatctgccacttcccactttggcgcgcgttgacattttgcgacaaaaagagattgttcgtggcagtcgtgtaaaaaactgcacctcaatcatgagtttttatgcccatttttcactatttcatatgaaccattggcaatgtacttcagcctaccctcatcggccagagtgtttaaatatccctctaattgttgaagagtaattcggttatatccccaatcttttggcacggtaattttcaaaaaagaatggatcttatgaagtttcattgcgcctaaattagtcagcattccttcgatgaatggcagacttctttgaagtgtcaattcatattttctttctatctcagaatcgttatgtagttcatagttactgttctcaatctccattggggcggtcttttgtgcttgatcaaaatccatctcgctatgttcaataacggaataggttccattttcttttaaaagcacacctttttgaatccagaaatctaacaaatgagttagcctgggaggagcaatatttagtgactcagaaagctgctctagtgataaacaaattggctcatcatttggagaatcaaactgatttattacgctgcattgttctaaagaaacgtctaacactaatttcctaccatctttgaaagctaattgtatttctacttttcctttatctttgcatagttgtaacttgcgcccaggtttcagctgtgagtatatatcagaatacttctgtagctccctttctaaatctattggtaaatgaaatgcaagatcattagaaccttgtgtatcgcagttgtacttccagtagaggagtgagataaattttggaaatattatgggatccagtccggctacttcatgcattttacggcagagctcctcgctacattttatatcccaaagcataacatcaatgctattcaaattcgactggtctgcatctgctgcaggggctgttgtttctaggagtcctaatataccgtttgttatataattggaatgacttgtttctgtgaatttgactattttttctcttattaatttcaaacatcgggtccatttttcatccaacgtataaaatttcaaagtgaataatctgtcggttaagagatttcgaaattctgatatgaaaaattctcttgattcaaatagatccaaaagcacctcaaacaaatttgtcttaatataacttgatttgatgttaccgggaatcatgtcattaggctctggtacccaagctatataataattgagtatatgttcgtatagcatggcgtgtcttattggtaggtccttgttcaattccctctttcctttcaccttgaggttccatagaaaggggctttttttattcttgtcccttttggtgatgttcgtatcttgattgatatcagaatcgtgcaaagtgtctacaagtgagagcagtgccttcatatctacattgaaattaattttctcctttagttcttcttcaggtaagtccaacattgcgtataacaatacatttactaagtgcttccgctcctgaaagtaaggtttaacaaacgtggttattgaatgtaggcatctccctgttggatccaggaccaaaaatgctttgatagttttaacatatctcaacaaagcgtccaccgtagttacgctggggtttagaatgtatttcttgaaatcagacaaaaaagttgttacaatatttgtgtagtctttaaaatctttcataattttcctcaattccaataaagtaacctttgaatcaggataagccaaaacgcatatatcaaagatttcattcgttcttatcctaagaaaattggactcaaaacagttgaaaactgtagtggtcagttcgtgatcatcctctggacaaccgactaatttagagaactgagaccaatattgattaataaatttgttgaatgtttccataatcataaaccttttattccatactctactcatgttatcttcacaaaatttattgattttgctgtaaagagcattgactatcaattccgtagaggataaggaaccattagcagatttgagccattggattaaattgtctgccaggtcgaaatcatcatccattattaatttgtctaatcttgttcttaaattatttttgaactttatatttctattcaacagataatgtcttaaagaattaagttcaagtgcccagtcgtttacatttacgtcaaaaataggaacgtaacgtaaaggaaactcgtaataattttcccatcgttggatatcttttagataattaatgttgttaaaatgtaagaaaaaatgataacgaacctggaaaatataaaactctttgagcgtggaaaaaagttgtagttgtaactctttgtttgtatttccctcattaactattgaattgtttgcctgactagtgtttatcatgctatatggcgatgtggttgcgttattagggaagagaaccttaatgatattcttaatacgaaggcttggaggacgtagttgatggttactcttggcatcattagggctcatccatgtaagtaaagagttcaaatcatcgactatgtttgtgtgaaagatgtatgaggaaagtgtttgtaactcatctgtaataactttcaaatctcgagttggggtaatctgaaatgacatgatggaaaaaccttaactataagccataaatatttacagtcccgctaagtctggctttcgtctagttttcgatattttggctcttttgtctattactgtttttgtaaccaaaggtttgaaaatttagatgcaactaatgaacttacgcagtaacatgcaagtacccaataaaaaaagaaatttttgaagagacgttcttgcattcaggacatggtatgtttttaatttcgtttctttagttctcaggctcttcaaagtactaacactttattggcaaggggcgctcaaatgtgatgcatcattatagagtaataataaaataaaaagaaaggatgcaagcccggaacaagaggcaattgaatcattcacctcattaaccaaatgtgaccccaaggtatccaggaagtacctgcagcgtaatcactggaacatcaattacgctctcaatgattattatgacaaggaaatagggacgtttactgacgaggtttcaactgtggctcatccacccgtatacccgaaggagctaacacaggtatttgaacactatatcaataacaacttgtttgatatagactcactggtcaagttcattgaggagctaggctacaatcttgaagatttagcgacattatgcttagcccatttactggggtacaagaaactagaagaacccttaaaacgagaggacttcctgtcaacatggtttatgcaaggctgttccaccatttcagacatgcaagagtgcatcaagacgttagatgttaaattacatgaagacttacaatatttcacacagatttataactatgctttcaatttgattctggacccaaatcgaaaggatatagatacagacgaaggcatccagtattggaagctatttttccaaccagagtacccagtgcgtatggaaccagatttgcttgaggcatggttccgtttccttcgcgatgaggggaaaaccactataagtaaagacacctggcgtatgctgctcctctttttcaaacgataccccactattcagaaaataataagcgattacgacgaaactgcagcctggccatttattatcgatgagttctatgagtgcttacaggatcagcaataaacatcctttcatatacttaagggtatgctgtttaatattgcatggaatacgttacccttctaagatagatgggaataaggcggaaataaaaaacgcgatgagcagtggaaaatttttcagaaattttcagttccctcataatatagatgtagatattgtataaggtcgtacgtatatcagagtagccactagaaggaccagagaaactggaataagagctattatggtcaaatcataccaacgttttgagcaagcagctgcttttggtgtaatagcctccaatgccaattgtgtttggatacctgcgtcatccggaaatagtaatggtagtggaccaggacaattgattacgagtgctctcgaggacgttaatatatgggatattaagaccggggatttggtcagtaaattatccgatggcttacctccaggcgcatctgatgctagaggcgccaagccagccgagtgtacatatttggaggctcataaagatacggatttattagctgtcggttacgcagatggtgtcattaaagtttgggatttgatgtctaagactgtgcttttgaattttaacggtcacaaagcagctataacattattacaatttgatgggactggcacaagattaatttctggttccaaggactccaatatcattgtatgggatcttgttggagaagttggtctttataaacttagatcacacaaggattccattactggcttttggtgtcaaggagaagattggctgatcagcacctccaaagatggaatgatcaagctatgggacctaaaaacacatcaatgtatagagacacatattgcgcatactggagagtgttggggccttgcagtgaaggatgatttactgatcacaactggtactgatagtcaagtaaaaatttggaaactggatatagaaaatgacaaaatgggggggaaactaacagagatgggtattttcgaaaagcaaagtaagcaacgtgggttaaagattgagttcataacaaattcgtctgacaaaacctcttttttttacatccaaaatgctgataaaaccatcgagactttcagaattagaaaagaagaagaaatagcaagaggtttaaagaaaagagagaagaggctaaaagaaaaggggttgacagaagaagaaattgcaaaatctattaaagaatcctactcctcctttatattgcatccttttcaaaccataagatcattgtataaaataaaatctgcatcatggacaacggtctcaagttccaaacttgagttggtattaactacatcgagtaataccatagagtattattccattccatatgaaaaaagagacccaacaagccctgctcctctcaagacacatactattgaattgcaagggcaaagaacggatgtgcgtagtattgacatcagtgatgataacaaattacttgccacagcatccaatggttcattgaaaatatggaatatcaaaacacataaatgtatcagaactttcgaatgtgggtatgcattaacttgtaagtttttgccaggtgggctactagtcatactgggtacaagaaacggggagttacagctctttgatctagcatcatcaagtcttttggataccattgaagatgcacatgatgcggcaatttggtcgctagatctgacctcagatggtaaacgattagtgaccggatctgccgataaaactgtcaagttttgggatttcaaagttgaaaatagcctagtgccaggtaccaagaacaaattcctgcctgttttaaaactgcaccatgatacaactttggaattaactgacgacattttatgtgtacgggtttctcctgacgatagatatctagccatctcgttgctggataatactgttaaggtattctttttggactcaatgaagttttacctaagtttatatgggcacaaattacctgtactatctatcgatatttcatttgattctaagatgattattacgtcttccgcagacaaaaatatcaagatttggggtttagattttggtgactgtcacaagtctttatttgcccatcaggattcgattatgaacgttaaattcttaccacagtctcacaacttctttagttgttctaaagacgcagtggtgaaatattgggatggcgagaaatttgaatgcattcaaaaactatacgctcatcagagcgaagtttgggctttggcggttgctactgatggcggctttgttgtttcttcatcccatgatcacagtataagaatctgggaagaaaccgaggaccaggtatttttagaagaggaaaaggagaaagaacttgaagaacagtacgaggatacattgctaacttctttggaagaaggaaacggtgatgatgcatttaaagctgatgcatcgggtgaaggcgttgaagatgaagcatccggtgttcataaacagactttagaatcgttaaaggctggtgaaagacttatggaggcgctagatttaggaattgctgagattgaaggtttagaggcatataacagagatatgaagctatggcaaagaaagaagttgggtgaagcgccaataaaaccacagggtaacgctgttctaattgctgtgaataaaactcctgagcaatatattatggataccctgttaagaataagaatgtctcagttagaagatgcactgatggttatgccattctcatatgtcctcaaatttttaaaatttattgataccgttatgcaaaacaaaactttgctgcactctcacttaccattaatttgcaagaatttatttttcattatcaaatttaatcataaagaattggtttctcagaaaaatgaagaattgaaattgcaaataaatagagtaaagactgaattaagaagtgcattaaaatctaccgaggatgatctaggctttaatgttcaagggttgaaattcgtcaagcaacaatggaatctaaggcataactacgaattcgttgacgaatatgaccaacaggagaaagagagtaatagtgcaaggaagagagttttcgggaccgttatataataaaactattatcctacataataccggcattactctgcccttttcacacttcaaaaggatagattaaattatctgtatattatacaattccaatcataaaaattgtcattccgattgcccttcggtaataatgggcatatccaaataacggaatatgtgttttttatacttattggtcgctgacatatgctgttttttgcgagatgtctctcgtctctgcagagcagttgtaaaattataggtcatgcatttttttttttttgataatgaataactatctaatctaacaaaatatacgtgagatactatgcccatttccctagaagagccattaaagcagctccacaacacatgatgagatatgcactaagcatttttttgaggccatcaggtcctttgaattgattagagtataagaattcatgagccattaattcgactagtccagtataaataagaattcctgatgatatcgagtcaaaaacaccattagcaattaatgctcttctagagccaggtatccaagagtgtctgacaccaatacctaccgcgactgctatgggtgacgttaaagtgaaggctaatcccattaaccaaggcatgtacttcttactttctggccaattcgtttcggcaactcttgtgcctagacccaaaccttcgaacatttggtggaaagttaaaacgataaataaggtttcgaattcttcacccgcgacagatagcgaaagacccacaaatacagagtgaaagatgatgccaaattctagaataaaaacagctagtatctgattgagatactgctctttatcttcctcctcgatacgtgtggccaactgggagacatcttgatggtcattttcgtgagaataatgatcttttccaggtacagaagcgagatttgtcgcatgggaactggttggaactagttcattagctagtgactctgtttttcccggttccagatcataattagtaacatttgagccgggttctttttcctttataggagtagcgacaatctcttcatttctagtagtgtacggagttttgtcattatggatggagtaggcagcttcgttattgaaagatacaggatccgagtccatatttctgatgacaaatcccgaactgggagcatcaacatcaatactggtaacttccccatggtccccatgatcgtgtcccagcgttttcgctacaaaataatgcgtgatgatttcagtgaagaaaagtaagaaaagcgacattaaacagatcccaaaagcccatggatattcggcaaatgtgccaccaagacattcatctcccagagcttcggctgcgggctgtagaagatgaacgaacgctgtggcaacaatgacaccagaaccgaagaacttcgctatgaaaaagcaccaatttggtagccttataaacgaataccgtgatgacaaaattgggaaataaactcccaatcctgacgatatcagtataatgaatactgccagaattctaagacctgcgtgcccattgtagccgttagaagcttggcaagtatctacggagtcatccctcgctataagatcaaccatactttcgaatatgcagtgtcacttggaaacgcctgcaatgttttctttggttgatgcaccgttgtattttcggagatcaactttagctttcttccggtctaaccaacagggtgtatgattcaataaacagtatcatcatatatagtgggttttagatcgtgtctcccaaaaggttgcgtcatttaaaatcgtcacactgtgttttaccaaaggatgtgtgaagctggtttgtagtagttaaagggcaatgtaccctaaaggttgtgaaaaattttcattttcgagaaggagtcgcatataacctttagggttatgtccctataaacgatgactattgccttttttggcccttaagactacagtgtacgtaaatcgtaaagaaataaatgtattatattattgttactattatttattatgttaatatcatgcatagataaatgttcgtcagagagcatcagtttcgtttgaaagggtgcggttcgagttttgctcgtgcgctgctgtggatgggggtggatccagtaatccatgtttgcgcatatcatctcgcagctgttcctccattttcattaggacgctcccatctttatcccgggcgatagtttcttttacgggacttgtgtcatgcgggctgtcaagcaggctttttttgggagatgtaagtttcttgttgatcgaatgttctaatttcttaccgccggtgcaaatcatccgacttctatgcaccattagagcatcctccctattaaatctctttccgcatgggcagatgtatttcttggcattatgggagattttgtgtcttattaaatcatgattgcgaacaaacgccttggtgcaaccgggaaagtcgcatgaatacggtctatcttgcaaatgtgtctgaatatgcgaccttatgttgtatctacgcttgaatactttgttacagttagggtataagcactcgaatagtttgtcgggtagttccttgacgtactggtcaatggtacccggaggcagagtagttggtttcttggttattttcattggcgtagtcctaggtattatttcatctggtaaaggagacgtactatgcaaagtggggcttttgtgaatatcatgtgtgacaggtggtacttgcggatagctttccacttcacagtgactgttatttcgtatgggtgtcttaatttctaactgatgatctgttaaatccggtgcatttagaagcggagctaggttacttccgttctttggtggagctttgacgggagtatgttgaaatacatgtttttgtggcaaagaattcttaattggagtgttattgctggaaccaggaataggaggtagtacacttgatgacgctaaagcgtttgcatttcttaatgttgggttctgggtatttcgcatgtggatgggttcagtgtcatcctgcagttgtgatattgtcgagaccgtggaaactacggattcccttttcttgtggataggtgacaactgtgttctaggcgtgaacgtgccagcagcatatcgatcatccctgcttttatctgtgccgacgaggaagggcgatctcaaactatttccatttatccttggagagatacttagcccacccggggaagtcttttcgaacagacggaatatgttatcaccagtactattttttttatcattattgtttttatcactggtgttattatggtcattataagtcaagccgtccaagtttaaattataattttgtggagaaaatgaaagcagttcagaatctctcaaataaccactgttagaggaaaaaaggttcaatccattactttctgggcttttatttggatatcgttgcctatggtatttcctggatggtgaaccatttattgaagtatttgacatccgaggcgatattaacgtcggaggaggaaattgatatccgccatttgcagagttcgttgtgacgattatagcattatctttcattctaccgttttgcatggcaggtgtctttagtattactggagatccaggtttggaattagaatttgtagccccagaaaccaacttctgcgccacctcttcttgctcttctaatactttacgcaacttttcttgctgtatttgattgtctctcaactgcttctccaatttttcgttcacttccttttgtttttcaagagcaattcttaactcctcctgctgtttcaacaaaacttggctcaaatagctattttcaccatcattttcccttatatggtcaaagtcatcattgttattttttaccgtattatgattacccaattcatttatgagttccatgggttgcggatctttagacatatttagaatggattgctgtaaactggaaatactcaatgtcttattatggccgagaaatccaaatatcgctgtgccacttagacctctcttgtgtgaggacattgattttttgctatagtgggagactttgttgttttcatcaccaaggttccaagttctatcaatattctttttatcagaagaaccatcgcccgtcttaggagaaggcactaaaggaatatccagatctcttaactcttgagtcaacaggtcatcgatgttatagtagtccatacctaacaagttatcgaggccatcatcgttttcattattcaaaatataattgtcgggtgggggtatggtaggattgacattatcatgatgttgaacatactcctcatcttgagtgtctttcgcgaagcctgagggatttatataccacggatctacaacgttatccatgattgtattaacaccgtttttggtcctatagatttctttagttatttcttgaatttatgccttgtatttttttcttctagcactttaactgttgcttgagtctccctgcaacgtagcttttgtttgctaggtacaatgccgagagaggttgttataagtttatgtgtactataaaacccttaatgaaagaaaagggacagaaatattgcgagtaaacaaacagtactccctccttaatatttgcccgttaatggctaaatgctttctggagttgatttactagctacaagcatccttatcctttacctgtaaaccaaaagtgtcctgaaattttcccaaagtgccaatgtttacattttgccgttttgagatatatatcgtatattatgacaaccttcacctatctgacgagccgctctcagtgccccggtatttttgggcggctattcctataacactattagttaaaagggattctaatggagtgacggttttcatcacaatagatagagttaactaagaactctagtttgtatgcaaagtcattattgagtagtaaaagcgcccccatcgtctcgtttaattgttgataacgttttaatgtggcttttgaagggttgctagcgatggcaattgaaacatgtaaattttgcctacttacaattaaatcctgatagtttgaaatgcctgatttctgaagtgcctcagctattatcgttttgaaaggagaaatttgtgccttattgggacattctgagacagggagaccgaggtacaaggtgttggctcgttctgatatatataacttcggatatgagcagatttgaagtttaaaaggggttatttcattatttcgtaaaccattacgcatttcttgaatgaaaacatgtctttgttcttcagtttcaaacaacaacgatcgagttaaggaaacgtgtaaaggtttgggggctcccaagtgtgagatgaacaacgggtcaaaatccaccagttgatacggattagtgtattcctgtttcataaatgtttctttatatttacatatgattttctgaagttgtcggtgaatcgctggagtcggacgccactcaaaatatgtgaacgaacgccaaaatcgactcatattcatatcctggtgctcgtacttttgtaaattcggagggatgtggtacttcaatataattgaatccggtattgcaggtaaatcagtggaatcggctttctgtatgcaagttttctccgtgtattcgatttggacctcacttttgttactactttcgctctcggtatcactaccgtcactgctagaatagtctgcagatatgaattccataggccagtcttcttctaagcgattggtaacctccttcactttagaacaccaccaacagatcgttctcttgttctttgttctttatggtataatattcacatggtgctctaccgtttttcttgtcggcccagccggttaaatctcgaagagacagaatagaagctctgtggctgtaagtaaggataagccaaatggaaaagttatagaattaggacaacaatatacagtttttttttgtactcttatagaatacacacacatagatacgcacgtaaaattagagcaaaagatggtacaagaatcacgtccagggagtgtaagaagttactcggtcggttaccaagcaaggtccagatcgagttctcaaagaagacattcgttaacacgccaacgttcctcgcaaagactgattagaaccatcagtatcgagtctgatgtgtctaatattactgacgatgacgatttgagagctgtcaatgagggagtagcgggtgtgcaactggacgtctctgaaaccgcaaataagggaccaagaagagcatcagcaactgatgtcacagatagtttgggttcgacttcgtcggaatatattgagattccctttgttaaggaaacattggatgcaagtttaccttcggattatctgaagcaggacatattaaatctcattcagagtttgaagatatccaaatggtataacaacaagaaaatccaaccggtagcacaagatatgaacttagtcaagatctctggtgcgatgacaaacgcaattttcaaagttgaataccctaagttaccatcgttgctattgagaatatacggaccgaatattgataatatcattgacagggaatatgaattgcagattttggctaggctttcattgaaaaatataggtccttccctttacggctgttttgtaaacggtagatttgagcagtttctggagaattctaagactttaacaaaagacgacattagaaactggaagaactctcaaaggattgcaaggagaatgaaggagttacatgtaggtgttcctctcttgagttcagaaaggaagaacgggtcggcttgttggcaaaagattaaccagtggttgcgcacgattgagaaagtcgaccaatgggtgggggatcctaaaaacattgaaaactctttattatgtgagaattggtccaagtttatggatattgtcgatagatatcacaagtggcttatttctcaagaacagggtatagagcaagtcaacaaaaatcttatattctgccataatgatgcccaatacggcaatttacttttcactgctcctgtgatgaacacaccgagcctatacactgcaccttcgtctacatcattgacttcccaatcaagttccttatttccttcgagctccaatgtcattgtagatgatataatcaacccgccaaagcaggagcaaagccaagattccaaattggtcgtcattgattttgaatatgcaggtgccaatcccgccgcatatgatttagcgaatcatctttccgagtggatgtatgattacaacaatgctaaggccccacatcagtgccacgctgatagatatcccgataaagaacaggttttgaatttcttatactcttatgtttcgcatctaaggggtggtgctaaggaacccatagatgaagaggttcaaagactctataagtcaatcattcaatggagacccactgtacaactattttggtcgctctgggccatcctacaaagtggtaaattagagaaaaaagaagcctccactgccatcactagagaagaaattggacccaatggaaaaaaatatatcatcaagactgaacccgaatcccctgaagaagactttgttgaaaatgacgacgagcctgaagctggcgtcagcattgacacgttcgattatatggcttatggtcgtgacaagattgcggtcttttggggcgacctcattggcttaggcataatcaccgaagaagaatgcaaaaatttcagctctttcaagttcctcgatactagttatttgtaatacgtatacgaattccttcaacaaaggccaaggaaataaagcaaataacaataacaccattattttaattttttttctattactgtcgctaacacctgtatggttgcaaccaggtgagaatccttctgatgcatactttatgcgtttatgcgttttgcgccccttggaaaaaaattgattctcatcgtaaatgcatactacatgcgtttatgggaaaagcctccatatccaaaggtcgcgtttcttttagaaaaactaatacgtaaacctgcattaaggtaagattatatcagaaaatgtgttgcaagaaatgcattatgcaattttttgattatgacaatctctcgaaagaaatttcatatgatgagacttgaataatgcagcggcgcttgctaaaagaacttgtatataagagctgccattctcgatcaatatactgtagtaagtcctttcctctctttcttattacacttatttcacataatcaatctcaaagagaacaacacaatacaataacaagaagaacaaaatgtctgaaataaccttaggtaaatatttatttgaaagattgagccaagtcaactgtaacaccgtcttcggtttgccaggtgactttaacttgtctcttttggataagctttatgaagtcaaaggtatgagatgggctggtaacgctaacgaattgaacgctgcctatgctgctgatggttacgctcgtatcaagggtatgtcctgtattattaccaccttcggtgttggtgaattgtctgctttgaatggtattgccggttcttacgctgaacatgtcggtgttttgcacgttgttggtgttccatccatctcttctcaagctaagcaattgttgttgcatcataccttgggtaacggtgacttcactgttttccacagaatgtctgccaacatttctgaaaccactgccatgatcactgatattgctaacgctccagctgaaattgacagatgtatcagaaccacctacactacccaaagaccagtctacttgggtttgccagctaacttggttgacttgaacgtcccagccaagttattggaaactccaattgacttgtctttgaagccaaacgacgctgaagctgaagctgaagttgttagaactgttgttgaattgatcaaggatgctaagaacccagttatcttggctgatgcttgtgcttctagacatgatgtcaaggctgaaactaagaagttgatggacttgactcaattcccagtttacgtcaccccaatgggtaagggtgctattgacgaacaacacccaagatacggtggtgtttacgttggtaccttgtctagaccagaagttaagaaggctgtagaatctgctgatttgatattgtctatcggtgctttgttgtctgatttcaataccggttctttctcttactcctacaagaccaaaaatatcgttgaattccactctgaccacatcaagatcagaaacgccaccttcccaggtgttcaaatgaaatttgccttgcaaaaattgttggatgctattccagaagtcgtcaaggactacaaacctgttgctgtcccagctagagttccaattaccaagtctactccagctaacactccaatgaagcaagaatggatgtggaaccatttgggtaacttcttgagagaaggtgatattgttattgctgaaaccggtacttccgccttcggtattaaccaaactactttcccaacagatgtatacgctatcgtccaagtcttgtggggttccattggtttcacagtcggcgctctattgggtgctactatggccgctgaagaacttgatccaaagaagagagttattttattcattggtgacggttctctacaattgactgttcaagaaatctctaccatgattagatggggtttgaagccatacatttttgtcttgaataacaacggttacaccattgaaaaattgattcacggtcctcatgccgaatataatgaaattcaaggttgggaccacttggccttattgccaacttttggtgctagaaactacgaaacccacagagttgctaccactggtgaatgggaaaagttgactcaagacaaggacttccaagacaactctaagattagaatgattgaagttatgttgccagtctttgatgctccacaaaacttggttaaacaagctcaattgactgccgctactaacgctaaacaataagctaattaacataaaactcatgattcaacgtttgtgtatttttttacttttgaaggttatagatgtttaggtaaataattggcatagatatagttttagtataataaatttctgatttggtttaaaatatcaactattttttttcacatatgttcttgtaattacttttctgtcctgtcttccaggttaaagattagcttctaatattttaggtggtttattatttaattttatgctgattaatttatttactttcgtattcggttttgtacctttagctatgatcttagctaattgaagagggtggtgtgatctttaaccataccttattatctttcagctgcttaccattttcttatattgatttttagcgaaagatttttattcacaagctttttttatccttaatgctcgaatactacaacaaaacaaaaaacattaaacagtttttaattttgtgaacaaactgaattacaaggccttacatcttatttagaatatattaagaaacagaggccaacatgccttcttaattatattgatatggacctctgtccttcctaaaaacgggtttttgttcgatgaaaaatcaccagtagagcaccatatatgaatttacaatcattgtagggaaaagaaaacttgttctgcttcgccaattgatttcatttctttttttcctttgtttttgttgtatactattaatatgcgtagttctttgtcacttagtggttttttgtttaatttataacgcgaaagctgcatactaaaaatatagagatgaatggaactccgaacaagcaagagagatattatctatctctgttccataataataaccagtagttcagttggggaacttaataatggaacttcagagggcacaacggaatttgaagtttttacaaaacgaggattatgtgaacgttaccgatcaaactaacctgaatggagagagccagaatgcttactctttaggaatggaaactcaagtaccggaaatgcagttttccttatcatctgatgatgattcaataggtacgcaagtaaaaagcgtaactgcacaaaaatcgcctatgacgcaagagactacgaaaaacgatacagaaagaaataaagatgttgataaaagttgtaacccagtcagcacttcccatcccgatttaggcggatcaaatatcgaggagaacatattcattaacactcaaattcaaagccgacttgatgacgcagaggaagaaacaaatcttaagttaaaacttgaaaaattcaagtattcgttcaagagtagtaacgcagatgatacccacagcaatgcaaatgtaacagctaaaagaagaccagcaataaggaaggctaattcgaaactcaaaacaaaacctaaaactaaacgagaccctaaaattatcaaaaatataactgatttcaatattaataactacgaacgttcaaggactgccagcttattaaagcaattatcaggtaagcacaagaaggttttggacataataaagacgcaaaatgaaggaaacagtgataaacctcccagagcaaggaataacaagggtgaaaaagctacttttgatacatatagtgaacaggagtggaaagatattatgaaacttcttctacaaaagtttccgcaaagtgaggaaacggatttgaatgaagtccagaaatttttatatggaagcgaaaaaagctcgaattctctagacaatcaagaatcctcacaacaaagactttggacagcatcacaattaccacccgagcttcccgatgaggctattcaaccagagcaggaagaaaggatacgcgatacccaaagtgcagtaaatttcttatcgttgtctcaagtaatggatgacaaaagtgaaattatgaaagacgaagaaagcataattatttcacggggagattctacaagctctcaagaatatggaaacgggttagagccacaacaaccggtaggaaatgttgttggtgaagatattgaactggctgtgggaacacgtataaatgcattttcactgacagattataaagcttgcaaacctatgtctgttgaggtaagtagaagatgcgaaaacagtacggataatgattatgacaatatttctattgtctcagatactacagatgagacatccacattgtttccactagaccagtatcggtatgttttcattgaaaatgatgaaagaccaccattagccaccgacacgataggcagcacacagtttttcactccaaacacatcgcctttggatgggataatcgatttaacacaggaatcattcaaagctgttcgatcgttaatatcacctttgaaagtagaaaacaacaaaacaggggtaacatcacaagcatcaaatcaggttcaggtaccagctacaagaacccctacaattattcctcaaaagaaccttactacaactttaaaaactgaagaagaaaagaataacataggaagttccatcagagttaaattattgcaagaaagcgtagttaagctaaaccccaaactggtgaaacataacttttatagagttgaggcaaatgattctgaagaagaggagacagaatttgatgaccaattctgcattgctgatatccaattggtagattcctccaaaatttcgactaaagattctacacaaaatcctactactagcaacgacattattgatacctctgcagctagttccatagcttctcccgagaaattttgtgagatcatgatgtcccaatcaatgaaagagcttcgacaaagcttgaaaacagtggggttgaaacctatgaggacgaaggttgaaatcattcaatccttacaaactgcatctcaaattctgtccacagctaatccagataataaaggtgagcatggtggggtggcaaatttcagtaagatagaaatatttgatcatttaaccgaactaattgaagccttccctgattttttggagcgaatatatacctttgaacccattccgctaaatgagctaattgaaaagctgttcagcgccgagccatttgtttcgcaaatcgacgaaatgaccatcagagaatgggccgatgttcaaggaatatgtctgagaaacgataaaaagtagtgccgaatgattgagaatttgacaaaacaaaaacaaaacaaaacaaacgttacgtatagatgaagaatacacgtacacaaatatgcatatataccgtcatgaagtagcttaacttaaataaaagttttttttttttagagttaccaatatcgcaaacatgaaaatgagaataaaaaaaaaaaagcagaaaaaaaaaaagcataacatggagaaaaaaataataaataattgagtttagttgagacgccggtcttcgccaggccaggaattgtttcaccaggtcattctctgcaaagcctttactttaacatttagattcttcttcttggcggagccgcgaccattgcttctcttttcgtctgattgtttgctagtcgaagagacgttacagtaagtaccagctttcacgtaaacagcaatgtcgttgtcgtcgccatgtttgaagcagcatcttctgccataaggacaataacctagtttctcccaattcacacagggcttcgtcctgaaattcttgcacgatttcttaacctttaattcgccgagtccgtgagcaaactgacacttactgccataagggcaacttccttttaaagtgaatgattcgcacagctctgtcttgtataattgtttgggagtttcctgcacttggcttttcaccttaggttgagctgaggattccttctctgatgaaaaagaagcatcatttttgggcttttgttgagacaactgttgcaaattctgtgaagttaatggtaattgtgaagattttgggacatagtccggatttatttgtacctctagtttctttttaaaagtagtaggtgccgtgctattcaggtgagcggatgggagaaaagggttcattaactgtggatcatacagtagccccggttgaatagcgtttgtattttttggtggagagaatgaaactgccgaagatatttcactgcttgtttcctgtatgttatcctcgtttaaaatcgtcttgttgtaatactcctccagttccctaatattgatctggtactggtagtcatttaatggattttgctcttgatctgtggaaaacaacgacgttaagtcagtcttctgagattctggtctagtatatgataattgagcccacatattgcgttattttttacgtattgagtttgcagcactgtttcgctttctctcaagatgcacaaatacgacctaccaagagcctccaagtcccaccaacgattatgtcttctctcaaatatatatacaagttacatgtagagaaatcgagacgagattgctggcacaatgcacccaactgcatgtgccattgtgcatctacacctccaaattagggtgtcgattggcgtcgtcttctttaatgtgggtgcattttgcggcggcgcgacaaatatagagaactgaccaaggcagtgctgtcaagaagagagaatggttacggcagcgaagacgcaaatgggctaggcagaatggcattcaagttatggctactggatgaggaaacaatatacgagcacgtgttcgaacggtacacacaattggagggccagtccgggaaactggcgcaggatttgggtattcaggatagaaggggcggtgtgctagagataacgtttgaaccctctgggctggaaggcggcagaaaaaaaaagcgagtgagaagaagaaataaggctagtagtgttgaagaagatcagaatgttgctgtggatagctatcatgttagcgtggggcagtccatatcaagcttgcgctcgtccagagacaacggaaactccaccacaggatacgttttgtggtctaccacacctttcttcatcaactggctgctgtatagtactagcgctgcacctttccgtcttgggagtcaggtggaagtaacctgcgggtcttcttgcgaggggcacaagcttgagttgcccaggctggtcgacctcacgggcgctgatcgcggcaagagaggtatcttggaacttggagcaggaatatcaggtattttgcccgtgattcttggtaacttcgtcgacacctacgtgtcgacagatcagaagggcattcttaataaattaaaagataacatcatggaaaacttatcacagttgaccagaaagcggtgcatttcccgatcactaagattggaacttcccaccgtcgaaccagttggcgacgctgatatcaccgcagcgtcacttccatctaagtctacgttgcatttggaagtagccgctctagactgggagaagataaacttgcaagacaaaaagacccactctctgcatcctgagttgtcactcataggtgaaacatgttcttccgtgtacgttatagctatggatgtcatatacaacgagtacctgatagatccgtttctgaagacgctcaagcaactcaaacactggttacaaactacctacaatttgcaattccatgtcctcgtggggatacacttgcggtcacaagaggtgacaacactgttcttggagaaagccatcatagaatatgacttcacggtttatgatatcgttgaccaggtcatacaagagtcccgttttaacttttatcttatcacctagtcccatatataataatagaaacaatataatgctgataatcttatttttctttgcgatgcggcagtgcctcttcccctccgtacggattgggaagattttcatttttgattagcaagggcactaagccaactctgtgtgatatagctaataatctaaaagctgctggatccgttatcgtcaagataaagcggacttagcgatttacataggatcacactttctacacacatttgatttttaagcttcattttccactgcacttatttttcccaagcatcgtgtttttttgtacattataaaaaaaaatcctgaacttagctagatattatggctatctgggagcaactagaagtctcaaaggcgcacgttgcttatgcatgtgttggtgtcttttcatctatcttctctttagtgtcactttatgtcaaggagaagctttatattggtgagtccaccgtagcaggtatatttgggctaattgtgggtcctgtttgcttgaactggtttaatcctctgaaatgggggaattcagacagtataacattagagataacgagaatagtattatgtttgcaaatttttgccgttgccgtggaactgccacggaaatatatgttgaagcattgggtatctgtgacgatgctattattgccagtgatgacagctggatggcttattattggtctcttcgtttggattcttatacctggcttgaatttttctgctagtttgttgatatctgcgtgcattaccgcaacagatcctattctggcgcagtcggtcgtctccggtaagtttgcccaaagagtacctggtcacttaagaaatctactgtctgcagagtcaggctgcaatgatggtatggcctttccttttttatttctttctatgaatttaatcctacatcccggtaatggaagagaaattgtcaaagattggatttgcgttactatcctgtatgagtgtttgtttggatgcttgctaggttgcttcattggttatgtaggcagaatcaccatcaggtttgccgaaaagaaaaacattatcgatcgtgagtcgttcttagcattttacgttgtcctggcgttcatgtgtgctgggttcggctccattttgggtgtggatgacctattggtatcatttgcagccggtgcgactttcgcttgggatgggtggttttctcaaaagacacaagaaagtaatgtttctaccgtgattgatttgctactaaactatgcgtattttatctattttggtgccattataccttggagtcaattcaacaacggtgaaattggcacaaacgtctggcgtttaattatactttcgatagtggtcatctttttacgtaggatccctgcagtcatgatattaagacctcttatacctgatataaaatcgtggcgtgaggcactttttgtgggccattttggtcctattggtgtaggtgcaatttttgccgctatactagctcgtggagaattagagtctacctttagtgacgaacccactcctttaaatgttgtaccatcaaaagaggaaagtaaacattggcagctgatagcctgtatatggccaataacttgttttttcattgttacttctatcatagttcatggttcttcagttgcaatcataactctaggtcgtcatttgaacacgataacgttaaccaaaacattcactacacacaccaccaatggtgataatgggaaaagttcatggatgcaaaggttgccatcgttggataaagctggacgatcattttcattgcatcgtatggatactcaaatgactttatcaggggatgaaggtgaagcagaagaaggaggaggtcgtaagggactagcaggaggtgaagatgaagaaggattaaacaatgatcaaattggtagcgtcgcaacgagcggaattcctgcaagacccgctggtggtatgccaaggaggaggaaattgtcaagaaaagagaaaagattgaacagaagacagaaactgagaaacaaaggtagagaaatattttcatcaagatctaaaaatgaaatgtatgatgacgatgagttgaatgatctgggacgagaaaggttgcaaaaagaaaaggaagcacgcgccgccacatttgcattgagcacagccgtcaatacacaacgtaatgaggagattggaatgggtggagatgaagaagaagatgagtacacaccggaaaaggaatatagcgataattacaataacacaccaagttttgagtcgtctgaaagatcttcatctctccgaggaagaacttacgtaccaagaaaccgttacgatggagaagagacagaaagcgagattgaaagcgaagacgagatggaaaatgaaagtgaaagatcaatggccagtagtgaagagaggagaattcgaaaaatgaaagaggaagaaatgaaacctggtactgcttatttagatggtaatagaatgattattgaaaataagcaaggtgaaatcttgaatcaagtagatatcgaggatcgcaatgaggcgagagatgacgaagttagtgttgatagtacagcccattcaagtttaactaccacaatgaccaatctatccagtagtagtgggggaaggttaaagagaattttaactcccacatctttaggaaagatacattcattggttgataaaggaaaggataaaaataaaaacagcaagtatcatgcatttaaaatagacaatctgttaatcatcgagaatgaggacggtgatgttataaaaagatacaagataaatcctcataaatctgatgatgataaaagtaaaaaccgcccaagaaacgatagtgttgtatcaagagctttaacagcagtaggactaaagagcaaagcgaacagcggcgtaccgcctccagtagatgaagaaaaagccatcgaaggaccctccaggaagggcccagggatgttaaagaaaaggacattaacacctgcgccaccgagaggagttcaagattccttagatctggaagatgaaccttcatctgaggaggatttaggtgatagttataacatggacgatagtgaagattacgacgataatgcatatgaatcagaaactgaattcgaaagacaaagaaggttaaatgcgttaggtgagatgacggcaccagcggatcaagatgacgaagagttgccgcccttacctgtggaggcacaaacaggaaacgatggtccaggtacagcggaaggaaaaaaaaagcaaaagagtgctgctgttaagtcggcgctatcaaaaacgcttggtctcaataagtaatttattaatacacaaagatatattattttagtatatatataaacgaaatgccttttttatttacatgtgtcggaaatagagtagatgcggtaaagagggggagggggggggggtatgcggttttgtcattactcttttccgttaaacttaaaagcttaaaacatcattgataaaggtttttagtgaggtttcactggggttcacattgatgaaatctaattgtctgtaggagccattgttcaaaaatccgcggctgatatctgaatattgaatgatgtatttatcatcttgggcagtgttcgtaggaaatcgtaaattcaagacacgatgggtcaaaacatcagtcaattggtattgctgtattaggttatctggtaaagaaatgttgatttttttcataagattctgatatttgtttaacttccagtgtgacttgagaagaaattcttggaggcctttttgttcagataaccaagcatccggattggtctggtcgaaatcaggtaaaagatcttgaatgtaatctgacgtgatcttatagtctgtctggcattgtggagttcttaagataacagaattttcttgtaatttcaaaagaggcctcattgaggtggtaacaatgttatcgaattcgtcaatctcgaaccaaatctgcaaaaaaggggacgaggaggagccagaggtgggcggcacaggagtgaagttcagctgtatgaaggattgatgcgcatttgttattagatgttgatcaagaggcacaggcacaggtacggctgatgatgatgattctttgtacattggtagattcagtaattttgaaataaaactcttatgtattagaggttggaaaatactagaaaaagacgcggactgtaaggagtgacctagcgttattgataaagattgggaaatagagtcggaaggggagagagatggtatatttttagacaaggaagattcgaattggctgacctgcgcatctgtcaattctggtgtggcgttttcagtgggagtcatcagatctgtgcaatttttagggacaactgactgtaatcttgcccaatcttgtgacttgtttagccagtccaagttctctagagtattgttgaacggatagagttctgtcttgagtgctggtgaggctattgtgtggtggtgttgagttgtgttaggattagaagcgacggcatttaataaaaagactttggccatggatattttcttggtgcttagggctgaaatcttgtacatttgcaagtccgggaggtattcaaaaaaagtgtgagtttccttctgaataaggttgatgacgtcttttgatggcatgagggaatacatacgcacattttcatgagtgatgtttgaccatattttgtttaaggatatttctgcgtatttgagcaagctaggcgaacccttgacggtcaattcgttatcctgaatggagatgatgaatgtcagcccgagcttattgaagttggtgagtattttaccattttgagtgatgagtaaaaggaaaatttctctaggagaatcgaactggaaagtcaatgatgtggacttgatgcctgtgggagtggtgggtgttgaaattggttggcaattccagattttttcaattatatattgggacagcttgcttttcttccagtgcgtcagatgtgaagaggagtctggctgatgtgtggagatgaactcgcgcagttggtagcgattgtagcttgatgtaagcgattggagaagggcattgtattccagggagggcagactggcgcttgtcggtttcttcaatcggatggagttcaatgcggaatctagtgaattctgcttttcgaagacaaggagtttcgagccgaaatcgaggttgttatctccagtttccttatggctacgtttcttagacggcctgtgtctaggctgcttctgatcatttttcactagcccagattgggtagggttcaagacgacgaatttcagattttgcggcagtttcttcttcccatgaaggggcgagcttgggcctgagcttgaataaagacggtaagtaagacgggcgagctttttgttgaatttccacatatgcttactctatattttctccagtgccttcaagctccgtatatattatgtactagttttattacattaaagatacataactttttttttttttttcagttcactgaaataagaaaaggcgggcgaggtgaaaaacaaaaaaaaaagtatagagaaacagaagtggaagaagagctaggaaagcacagcgcatacgacggtcacctaggatggagcaccaacaattgcggaagtacgtcgaattgtacaataaggaggtcgaggaattctacaatggtgccgcgtcaggccgcccagctgagttccatccttccaaagtacatgtaaagagcatccatgaaaaggcgggtaccgccaatgctggtgtagaaatctctagcgttggtgtagactgggacagcgaggagaagaatacctttttctggtgcctttcacgctatagtatccaccgtgtagacgagtggcgctcattgttgcctcggaagagcgccatggagattctaggttattacaggttgttaaggagagcgagtgcgagcgcgagatcgcgtaaggcgggtgacgacggagcgcccattgcgtacgaaatgagcgctgagtgggttgccctggagacaaaactgagcgagacagtgatggccatcacggaaggcgcagccgaggttgccgatgaggaaggacactgcgagggccttatcgattatgaaagctggaaacgcaggtgggtggccatctactcgcacagccgtatcgcggagataagacccttgccccgccacgcgctgccgctatcgcgcagcgcgacgcagactttggagcgctgcgtaagtcgctacacacgtacattgctgtggtgcacggcccttgcgggtatggcttcccgcagcgtcagcgccagggcggccgaatctcgaggacacaagtcgctaccgacggtggtaactcgccggcaagttgagcgtgcactatgcacagaagcccgatcacgtgacctacacgtgcttccaaggcgcattgttttgacactgcgcaaatgggaactagactatccgcgagagggcaaactgttccgcaccaaggagatggcacatctgtttctacaaagccagttgtccagacgggatgcgcccccagtccatcaagacgaaaatcaagaaaatcaagaaaatcaagaaaatcaagaacaagataacactgcaagtgaaggtgaaagcgaggcagaaagggatgaaatcgacgaagcggacttgttccgatcagcattacatgaaaatcagttgctaaaatggttatccaaatgagacacaatgcgaaaaatcgcgcagggacataatttttgttttcattattctttcgcttattccctccgttagctccaccgcttttttgattggaatttcctttcggcaatggctttccggttaccacgcctcgggtttcgcatcccgaaaagcatatctacacaagaaaaatgaatgataaacaattgatgagtggcgctatttcccttatcatctcattattgtacttagtatcgtctattatcaggagaaatcgcatgaactaagcccattttctcacccttctgccttcttatataaagcttgctgggaaccgaacacaaactccacaagtccgtagcagctcttctcttttgtcttttatatatcataaacatcgctacatagtaataacactaacgcacgctagaaatgatagcttccaaaagctccttattagttactaaatcgcgcataccctctctatgctttcctttgataaagaggtcctatgtgtcaaagactccgacacactctaacacggctgctaatctgatggttgaaactccggccgccaatgccaacggcaatagtgtgatggcacctcctaactcaatcaattttctacagacacttcccaagaaggaactattccaactgggattcatcggtattgcgaccttgaacagcttcttcctgaacacgatcattaagttgttcccttacatccccatcccagtaataaaattcttcgtctcttctttatactgtggcggtgagaactttaaagaggtcatcgaatgcggcaaacgtctgcagaagagaggtatatcgaacatgatgctttcattaactattgaaaattccgaaggtacaaagagtttgtccagtactccagtagaccaaattgtcaaggaaacaatcagctctgtccacaacatcctactgcccaatattattggccagctggaatctaagccaatcaatgacattgctccaggttatatcgctctaaaaccctctgctttggtcgataaccctcacgaggttctgtacaatttcagtaatcccgcctacaaggctcaaagggatcagctgatcgagaactgctctaagattacaaaagagatttttgaactaaatcaatctttgttaaagaagtaccctgaaagaaaggccccatttatggtttccactattgacgctgagaagtatgatttgcaggagaatggtgtttacgaattacagagaatcttatttcaaaaattcaatcccacttcatctaaactgatatcatgtgtcggtacttggcagttgtacctaagggactctggtgaccatattttgcacgaattgaagctggcccaagaaaacggctataagcttgggctgaaactggttcgtggtgcttatattcattctgaaaaaaaccgtaaccaaattatctttggcgataaaacgggcactgacgaaaattacgatcgtatcatcactcaagttgtcaatgatttaatcatcaatggcgaggattcttattttggtcacttggttgtcgcctctcataattaccaatcccaaatgctcgttactaatttgctaaaatctacccaagacaactcttatgccaaatcgaacattgtgttggggcaattactaggtatggcagataatgttacctatgacctaattaccaaccatggcgctaaaaacataatcaagtatgtcccatggggcccaccattggaaactaaagattatcttttgagaagattgcaagaaaacggggatgctgtgagatctgataatggctggccattaatcaaggccatagcaaagtcgattccaaaaagagtaggcctatgagaggactataatatatactccaatttcaaagacaaaccaaaaaaccaaaaaaaaaaaaaagtatgcatacataattctgatgttctagttatacatattatatataagtaatgataataacactaatagtaaagtaaacgcacggatatcaagagttaatatacttgaaccacttaaataacaatctgttggtaaagctttcttcctattgattatgggttcgaatagtaccagatgttttgccaatcctaaatcggtaggaaagtggcttgtcgtcgtcaggcttattatcaactcttatgcacaagaaaggtactcatcttctataaactacataagacctgaatctaatcaaagggagaaagcgcagaacatcagatttaaagcggttttgcttgatacactcagccttgtctctttgtaaggattttggggtacctatgaataatacatctagtagtgttagtaaaccaacgtatgggattttgggatacatagttttccagtgtttcttatccgtgatagtttaatggtcagaatgggcgcttgtcgcgtgccagatcggggttcaattccccgtcgcggagaatttttttaagcttctattaaagaagctttttttcacttatatctgatggatgatgaatagctagttcaaacggaaatctttgataaagctatatcaaaattcaaagcccaataagtcagtatcatgaagtttatagcattaatatcaggtgggaaggactcgttctacaatatttttcactgcctgaagaacaaccatgaattgattgccctgggaaatatatacccaaaagaatcagaagagcaagaattagactctttcatgttccaaacagtaggacatgacttaatagactattattctaaatgtattggtgttccactatttagacgctcaatattacggaacacttctaacaacgtcgagttgaattatactgctactcaggatgatgaaattgaagaactatttgaacttctaagaactgtcaaagataaaattccagatttagaagctgttagtgtaggtgccatcttatcgtcttaccagaggaccagagtggaaaatgtttgttccagattgggtctagtagtgctaagctatttatggcaaagggatcaagccgaactaatgggtgaaatgtgccttatgtccaaggatgttaacaatgttgaaaacgatactaattcaggaaataaatttgacgccaggataatcaaggtggcagcaattggattgaacgagaaacatttaggaatgtccttgcctatgatgcaaccggtgttacagaaacttaaccaactttatcaagttcatatctgtggagagggtggggagtttgagacaatggtcttggatgccccttttttccaacatggatacttggaattaattgatattgtcaaatgtagcgatggtgaagttcacaatgcaaggttaaaggtaaaatttcaaccgcgtaatttgagcaaaagttttttactcaaccaattagatcaattacctgtaccttcgatttttggtaataattggcaagatttaacccaaaatttgccaaagcaacaagctaaaacaggagaacaaagatttgaaaatcacatgtcgaatgctctaccacaaacgacaatcaataaaaccaatgataagttgtacatctctaacctacaatcacgtaaaagtgagacggtcgagaagcaaagtgaagatatttttactgagctagccgacattctgcattccaaccagattccacggaatcatattttatctgcgtcattattaattagagatatgtctaatttcggaaaaatcaacaaaatatacaatgaatttttagatttgtcaaaatacggacctttgccaccatcaagagcatgcgtaggttcgaagtgcttgccagaagattgtcacgtacagttatcagttgttgttgatgtaaaaaatacaggcaaagaaaaaatcaacaagaataagggcggactacatgttcaaggccgttcatattgggctccatgtaatatcggaccatattcccaaagtacttggttaaacgatgatgcaaaccaagtcagttttatcagtgggcaaatcggactagtaccgcagtcaatggaaatattaggaacacctctcactgaccaaatagttttggcattacaacattttgatactttgtgtgaaacaataggagctcaagaaaagttactcatgacatgctatatttcagacgaatcggttctcgactctgtcatcaaaacatgggcgttttattgttcaaatatgaatcatagatcagatctatggatggacaaatctgatgatgttgaaaaatgcctagttcttgtaaagatttctgaattacctagaggcgctgttgcagaatttggtggtgttacttgtaagagattaatagtggacgataatgattccgacaagaaagaaagggaagagaatgatgatgtttcaaccgtattccagaaattgaatttgaatattgaaggttttcataacactacagttagtgcgtttggatataatagaaactttattacgggatttgtagatagtagagaggagttagaacttatcttggaaaaaaccccaaaatcagcccagattaccctctattataatcccaaagaaatcatcactttccaccatcacattggatactatccggtggagaaactttttgattaccgtggtaaagaacaccgctttgggttgcatattcgttcctaactccaaatgtaggccttatattttataaacttaatagatatacgctgtccacgctcctggcggtgtaaatgatagacagatcccaaatatgttagcaaatcataggaacaacaccatattgtgaacacgtaaaatttagaatacgccgcacaattaaggtgtgttctgtaataatttgattattgatgatggtttaggaaccaatattcatataaaaaaatgatcattctataaaataccttatcgtaacacttgtaccatgctactaacactgtatatatttctgacccctaagaaaaagcacctgaataagctaaagaccaagttaagctttgcccattgtctaggaaatttctgttgaaatcaggttggctgaaaaagtcgtacgaaaattttggatcaagcagagccatatttaacatgattattcctttccaaccgtcattcacttgatcaattatcggctgcattttttcttcccactcctctttgacaaaatttggtgttctgacccatgaagatgctgatgttataggaatggcgtgaatcatatgaatgtattgaggctccatgccaaaatacgtggcgtgatcaattttattttcgaataaaataccactaactttattaccaataaattctttcggttggacagtattattgctttcgtataggaagtagctctggaaaacatttctcatgatgccgagttgtaagttcgctatgtcagttaacttagaatttccagttaccaacccccacaattttatcgcatagcaagaattgacatcttctgaagtagattcttcatctttaccgtcaccacttggaaatagtcctttggcccatgaatggccattaaaccaatcaaatgacctaaattgagggaagtacggatcatcgttgtcaacaccagagtaatctctaattaagcactcaacccaatctctattattttctaaccaggagttgttagtaactccacttaaatcagaatcgactaaagagataatggcagccgttatgacatgataagagtaatgaaaatgatgatcattataataagagttaccaaagtcttggctagaagagcctgatgaaattatgcctttccaactaacgtcgtaatttaaaggtaagacttgctgattgctgatgaatctctccattgcaatagtcagtttagataataattcttttgttaaattttcatcatgaaggatgtaatgtgtcacataaagaatccacgcatactttgcaagtatcttaccagagaaatacatagaatctatgtttgattcttgttgagggtcactcaattgaacttcttgaacagcagcttcccgaattttagatagcttttcttgactgtaatctgccttcttattcaaagataacgcgacaggttcaaagcccaattcttgaggtacttgaacctgcatatcaaaactgtttgtgagataaccagtcattaagcctttaactgtggaatccaggcttgaggcaatttcacgttcctgcatttctggtgtgaatgccgctttatgatgtggtaaagcatacattagagtagttccagactgcgagtagcctgcaaccgtatagttaaatctgtaatttgtgaaatgttcatcaacagtttgccctgataggtcacagtatactggataacagcccgctgccatgtcaatactggggacggagtctgcagataattgacagataagaccattgattttatgagatgatattattgtattgctgtcgagtaatgaaatttgaaaatcttgtggaaaagagtaatcaggtgaggtcaaataaagtatccaattcctattattctcaagttgtatattatatttaccatatctttcattcacgcttatgcgctctaagctcctgaaaccaacggcgcttcttaattcaaaacccaaatcgtggtaaatagccgtgacaaagcccatcccctgaaccagcgggaattctataaactgggaactactcaaagacattagtaagcacatggacatatgtttcatatcccggaattcaagcttgatatcatttgaagagacaaattccctggccttgaatacaaatgattttatatttgtgggattgaagtagaatctgggaggatttgtagttgtatcaaaaaccctttgagacgctaaagtatgattggcggccaaaccaaacaattctggatcacgagaaaaccaaattgaataaggatgtgtccatataggttgtgtattatcgtctaataacatgtttgtgtagaacttgtttgtctccaatggatcaacagattgatcatcaatattcggctttggtaccgggtgttgaactttgttgaagacggaaggaggagcttttaagttagaaaggacaggtgattgaaaaatattgtcactattcacctggctgtcagctaaagggttagaactgcttggtgtgcgcagtgattcacctgccaccctattttctcgaggtttactggagttctcagaagaacaaactggtggctgaacatttgcgcgaggtggtaagggaggaggtcctctattggtagtaccgccaggtctattaggaacaggtggaggaatggcttgcctactgtaacacatctttttacttctcgtatttatttatttttgtttttatgatactagcacttttcagaaattcatgaattttatttatggttccaagaaaaaaacttcaaagaaatgagtactagaatgatatatccacaaaaaaaaaaagagcagaaacaaaatggatgagatggataatgtgatacgatctctggagcaagaatatcggttaatattgctcttgaaccataggaacaaaaatcaacatagagcggctagctggtatggatcgttcaatgagatgaaaagaaattgtggacaaataataacgctttttagctcgagaagattacaagccaaacgccttaaagatgttgaatgggtcaagttgcacaggctattacagagagcactttttagacagttaaagagatggtactggcagttcaatggcgtaattgcgctgggacaatttgtaacgttgggttgtacactagtaacattgctggcaaatgtgagggcactgtatatgagattatgggagattaatgaaactgagtttataagatgtggatgcttaataaagaacttaccgagaacaaaagcaaaatcggttgtgaacgatgtcgaagaacttggagaaattatagatgaagatattggcaacaacgttcaagaaaacgaactagtgataacgtctataccaaagcctctgacagagaactgtaagaagaaaaagaaaaggaaaaagaagaacaaatcagccattgatggcatattcggataaatatacaagtaaatagactttttaaaataataatatcaatgctaataaatcattcattaatgaccttgtctgcccaagtaggcaaaacaaacgcactagaatgtatttgaggattatagtacttcagcttcccttgttcttgctcagatatctttctttgcggaatgttcaacggtatattggcgttattactgcaaacaattaaacctaattggccagatgtataggttggaaccatggtatagcaatattctgtattaggaaatacctttttggctgtatttttcaaatcatgtaagtattttaaatttaaccaaaaattttcagagctttgcataataacaacgccattaggatttaaagcatctttcaatagttcgaaatacctctcttgaaaaaacgcttcagctggaccttcaggatcagaactatctgtaataatgacgtcaaatttcttatggacgtcggaagcacctatatcttgtaagaacttgaagccatcgcaaagtttcaagtccaacctttcgtcatcgaaagcaccattactcaatgtgggcaagaacttacgggataattcgatcactgatgagtcaatttctaccatagtgatatcttctacacagctgtgcttggctacttcccttaagacacctccgtccccaccgccaatgataagtacacgcttgggattagaatgcgcaaacatggcaatgtgggtgatcatctcttgataggcaaactcatcaaattccgtacattggacaataccatcgaggaccaaaacagtaccgtataccttgttacggaagattaagatgtcctgaaattcactgcgggcttcataaagtattgagtccacggtcatagtaaaggcctggcccggaaaacttttatcattaatctctctaaaccatccatctttgatgtaaggatgctgtgaattattaaccataatgtataactgaatctgtcactttatcctgcctgtctcatcggcgttttgatattttatttttaactaaaatcagcagcaacttgaaaaattttgagataaccttaaaaaggatctagcaataaagagaagctcgaagtagccatggacactgaagagaaaaaaaagactacagcgtcagtagagcatgcccggatgttgcaaaatgaaatacaacagttatttgctcagttgcgggatacgaattctcaaattcgctgcgatcttaacgagtttgaacaaataaaggaatcatctacaacagcggattcaaccacgaacagtgcgaactgataaatttatattcaaatatattttacataaacaatattaatatatatatatattccccctacaatgatgaatgcgtttctgccgtcacgtttcctattatcaccttctcttaggtcctcttattggtggcataggtcttgatgagttttttttgaataatggtgcattctttaagagatctggaacaacgataaatttgatctgtgacccacgtacgaatatttgatccatgtgtgttacagccccctggggctctgtagctattacatctcttagctgtacgttcatgctatcttcgctttcaacaagtttaccacgataagtcgctcccgttgttagctccagagaaacgatatgtccctgtgcctcatttaataatttcactggtattccattcatagtcattgtttctgatacgtgcctcgcagcgctttctgattctcttcgtattgctcttataagaattttttaacgatttcaaaaatatcaaatctatagaacgaaagaaataagaagctgccatccctagaaaagtaaaaactataaggtaccaagaagtaaaaagagaaatatagggatataatgataaaaacacgtatagaggaagttcagttacaattcctcacagggaataccgaacttacgcatttgaaagtctccaatgatcaacttatagtaacgacacaacggacaatttacagaataaatttacaagatccggccatcgtcaatcactttgactgtccattaagcaaggaactagaaactataatgaatgttcatgtttcaccaatgggtagtgtcattcttattcgaaccaactttggccggtatatgttgctaaaggatggcgaattcactcaattgaacaaaataaaaaatctcgacctcagctcgctacattggatcaacgaaaccacctttctgatgggaatcaagaagacgcccaagttgtaccgagttgaattgacaggaaaggatataaccacgaagctatggtatgaaaacaagaaactctctggtggaattgatggcattgcgtattgggagggctctctgctattaactataaaagacaacattttatactggagagacgtgacaaatatgaaatttcctttagtattaccagatgaatctgagcaatttgaaaggttaaaacatcatgcgataaagaaattcgattcgtacaatggactctttgcttgggtcacatccaatggaattgtctttggtgatttaaaagaaaagcaaatggaaaaagatcctgcttctaataattttggaaaattcctatcttcgtcgaaggttctactcaatttcgaactgcctgactaccagaatgataaagatcacctcatcaaggatatagttttgactgctttccacatcctgcttttgagaaaaaatacggtaacaatggtgagtcaattaaataacgacgtagtgtttcatgaaactataccgagacaccagttgactggctccaacactgatagtaatgagaaatttttaggcctagtaagagattcggtgaaagaaacgttttggtgtttctcaaacatcaacgtctttgaaattattatcgaaaatgagcctaattcggtatggaatttattagttcgggataacaaatttgacaaggccctatcgttgaaaggcttgacggtgagggaaatagaatctgtaaaactttcaaaggcaatgtaccttttccacactgctaaagattttcattccgcggctcaaactttgggaagcatgaaggacttgtcacactttggggaaatcgcattgaattttctccaaataaaagattacaacgatttgaacgtaatattgataaaacagttggataacgttccctggaaatcaactcaagtcgtcttgtcgagttggattatttggaattttatgaaacaattgaatgatattgaattaaagataaacacaactaagccagcttctactgatgaagacaatttgctaaactggaacctgaatctcaaggagaaatcgaatgaactaacgaaatttttggaaagccatctagaaaaacttgataatgaaaccgtttatcaaataatgtccaaacaaaaccggcaaaacgaattattgatttttgctagtctaatcaacgatatgaagtttttattatcattttggattgaccaaggaaattggtatgagtccttgaaaattctgcttacaataaataaccatgacctagtctataagtactctttgattctcttattgaattcaccagaggctactgtgtcaacgtggatgaaaatcaaagacttggatccaaataagttaattccaacaattttaaaatttttcacaaattggcaaaataattctaaactgattactaacatatcagaatatcctgaaaattactcactgacatatttgaaatggtgcgttagagaagtcccaaaaatgtgtaatccaatagtgtacaattctatcctttacatgatgattactgatccgagaaacgatatgatactagaaaatgatataatcaaattcatgaaatcaaacgaaaacaaatatgatcttaatttccagttacggttgtctttaaaattcaagaaaactaagacctcgattttccttttaacacgtttaaacttattcgaggatgccattgacttggcattgaaaaataacttgattgatgattgtaaggtaattgtgaatgacgagattcttatagaggattataaattaaggaaaagattatggctgaaaattgcaaaacacttattactttcaatgaaagacatagatataaagcaattaattcgaacgattttaaatgattccaacgaaattttaacgattaaggatcttttgccattttttaatgagtatactacaattgctaacttgaaagaagaactgatcaagtttttagagaatcacaacatgaaaatgaatgagatttcagaagacataataaactccaagaatttgaaggtggaaataaacacagaaatttctaaatttaatgagatttacaggatactagagccaggtaagtcttgtgatgaatgtggtaaatttctacagatcaaaaagttcattgttttcccctgtggccactgttttcactggaactgtataatcagggtaatactgaactcaaatgattataacttgaggcagaagacggaaaacttcttaaaggccaaaagtaagcataatttgaatgatttagaaaatatcattgtagagaaatgtggattgtgcagtgatatcaacatcaataaaattgatcagccaatatctattgatgaaacagaattagccaaatggaatgaatagtagtattcttttttagtcaggctgaaacactgaaattaaaagagggaagataaatatcattactattatctgactaaaatatgtgtcgagtatttacttacctaaatagccaagaagtaaaaaaaatgcgtatcaaaaatgaataaaacgtaaaattatcggggaaaaaccttgtattttcaaagagtaataaaacgggtgaattaaaatcacaatatatgtatggctgaagttcaacataagtcataactagagaaacttcttcttgcccatgagttaatattccacctcataattccgtaatctgtaccaataatcaaggagctcccattcctatcttcaacccaatcgatacctgatatattgttttcttctgagaattcgttactttcctgagttgtaatcactggtcttctcaaaaaattggatgtgcctctattattcctactatttgcagcaaaattgtcatcatctgacggtaagtctggcgttgaaggtggtctgagaaaactttcaaaagctcttgcggaaacaccatgatagtctgaagaaacacgatacgttgagtgaacatcattgtaagcttcataatattcatcatcttcaaaaacatcattactagcttgctggtgagaaagtattaaggggtcaattaaattttgaggtgcggaatttgacgacgaagttgcgatagaatcagcagcaggtgtgccaagacttgcgttaacattgttattagaataatcggcggttggtgccgaagtcgatactctccttaccctgaatgaacatcgtctcttgtatggatgagctacgtcacttgatgaactacctttcgtagaaaacagaaccgattcgttactaattttatccataactttcggaaaaggtagaatttgcggctccaaatacttttttgggattctttgagccatagttatccatggttctgtggttacatttggcatagagggcagcgaaaatcttcttcttgataaagaccgataatccgccccttgtaattcatttttgctatcattactttcgttttcgttgttattatttgtggtgaaattatgatttgtattatgcttccgttcgtttatatattccatattaactttatcaggaataacaataacttggtggttaacgtagtttcttgtatctacaacgtgtactctgccctgatgttcagaaatgaataataaatcatctaggccataactgaacctacagactctaaatgcaccgttgtgggaatgtggtctagtcgaactaatttctgccatgggagtagccatgtttctgatatcataaattgcgcaagtaccattttgaaataccgtcgcaaattgcaagtcgttttcggaaaaagagttataaaacccatggtctgaatttggagcttcatatatgttttcgatatattctgattcatcaggtaacgcaaaccgtggtatccgtctaacacgattgacagaactaccccaggaaggatgattatcgtaatgtaaggagaattggttggttaattcattttgattgtaaacagcaaatttattagaatcgccagacactaccatcgtttgaccatcatgtgacaaagaagcgttattcaaaggaaattttaaatccgcataacgcttcactagtgttacatctctattacttacatcgcattggtaaagatgaccatcattgttgcatgcaaaaagatcaaactgcatactggccctgtcataaagtgtgacacaattattgatgaactggcccaacgtaaaagtcatcattgtgtccgtttcttgattataaaactccacgatgcccttccagatattaggatttgaataatgtgaatttatagggaaactaatatttttggaaatattaatcggttgggaaggtggcggcaacgaaatatttgcatcttgagctaaacggttccaattagaagggaatcccttatcatcagaaccgattagaccaccacaaacagtcaacccatttaattccgtgaaacatctcggcttaaagttgaactctaccagtttctcggaaggaacatgtaaatttttggagatatacgagcccgttgtcctagaaccttttgtagacgttttttcagtagagtttttaccactgttactcggttgaatagaattatgtcgccttactggagacctcaatacggaagaatccgtatctagtactcttatcgaatgatcgtaaatataatacagtttactctggttcatggagcctggtttgatacaatcccgcaactgccaatggtttatggagaccttggcatcgtagagttctaaagcaggcatcatatagttttggtaaaccttatcagagccagtatttaaccgttcatcttgcagcgcctccttagattgccccgtgccatcaatggtcattctttaacacgtatacttttgtaacttattgctgtttttctaccactttattcgatcttacttgtcgttgcttaatcagcaaaagttttgtactagaataaagttgtaataggcttttaatccagagtctcctcctcctcactttctgatcatcaccccttattgcctcagaaaagagatcatactccgctttaaagccgttcaatgtcacgtgacacaaagttgtagccgtataacatatggcgctaccatgttgttatttagacgggtaacatcaccgtttagaaagataaaggaaagtgaaattattggaatggaaagtgttcccaaaagttcgcaccaacgcaaaaagaaatttttttttcaattttgatatcatcgttgcgtagaggaagccctaactgagtagagaaattatatggtattttccttgtaatatttgattttgagtcgatatcccctttgttcttcttccttccttcgcttgttttagttgtatacttggtttattgtggaagatttttttttctgcttcgtagttttaaattagaagttatttctttgcaaatttctcttccccccacagtattcttttagaggtgaagtagaaataaaccaagaaagcatacacattttattctcaatgtccaacccatttgatttgttaggtaacgacgtcgaagacgctgacgttgtcgttttgccaccaaaggaaatcgtcaagagcaacacttcctccaagaaggctgacgtcccacctccatccgctgacccatccaaggctagaaagaacagaccaagaccttctggtaacgagggtgctatcagagacaagaccgctggtagaagaaacaacagatcaaaggatgtcactgactctgccaccaccaagaagtccaacaccagaagggccactgaccgccactctagaactggtaagactgacaccaagaagaaggttaaccaaggttggggtgatgacaagaaggaattgagtgctgaaaaggaagctcaagccgatgctgctgctgaaattgctgaagacgctgcagaagctgaagacgctggtaagccaaagaccgctcaattgtctttgcaagactacttgaaccaacaagctaacaaccagttcaacaaggtcccagaagctaagaaggttgaattagacgctgaaagaattgaaactgctgaaaaggaagcttacgttccagcaaccaaggtcaagaacgtcaaatctaagcaattgaagaccaaggagtacttggaatttgatgccacttttgttgaatctaacactagaaagaacttcggtgacagaaacaacaacagcagaaacaacttcaacaaccgtcgtggtggtagaggcgctagaaagggtaacaacactgctaacgctactaactctgctaacaccgttcaaaagaaccgtaacattgacgtttctaacttgccatctttggcttaagccttatatatgaataattccaactgaaagaatccaataacagtgttctactttctgtttctattactattattattttaattggttatttactatataatttgcaagtgaagatgatcatgctggcaaaccaaagaataaaattgggttgacatccaatcgagaatatgacatatcattttgttttatttaagcaataaaaaataaatgacttttaatttacttttcaattttctttttttttttttcacttctgagatgtgcaagcgtgtagtttgtttgtatttgtataacaatttcatcattagtcattcttcattaaaaactttttgttatcgattaaggacatccagtatgattctttttctctcatcttgattatctcttgagagtattgttaggcaacgcattataccacagttttttttaccaaagcgagcggcactccagcaggtgcttcatgtagtattcaggtatcacatcgctatattttaagtttctgtcgccgttgatcattcctatctcccattcacttcttccgttcggttgcatctgattaccatagtcatgtagtccaactatcaaatcttcgtgccctagttctccttttaacttttcgtccattagtccattagctatacatgaaacgtcgaataatattttacatgtgagtccccacaaatccctgaatctgaaaatacctccatcaacaccgtcttcgtctgaacttgataaatcctctatggtttgcaaccatggcatttcgttattatttgctacgtgaaaatgataatgcataatcaaccattttattccaccccaattaagcttatactccttccgctcaaaatattctgcttgataactcttaacatcctcatcggcttcaggaagaagatgtataactaagtcattgagtggtacagaaaacaaagaagatgtttctccagggttcagcttaccaaaaaacttacggatatctaagggaactttgtatttatcctcatgtttttctaatttatctttgtaaagaaaacagaccattggcttaacacttaaaaatgttcttgataaatagcatggcatatccatgaccaaattgtctaatttcattccgaactccttatgcaagacctcaggatcatgcggtaacccaatctcctcttcagcttctcttctggctacgctttcaaaggtttcttgaaaataatcagctttacctccaggaaatgaaacatcacctgagaagcttctcaatgttcttgaacgtttagttaaaagcactcgtagttcgcctttcattccaatgaataatagtattattaccgccgaatttcttttgaaaggccatattgagctccgagtatatggtgttttatgaaatttgtatcttatcaagttctctattagttgctttgaactcagcatcctcctctgacttaatatcattacagcttttctgttacatgtgtgattctcttcaaatctacaatattattattgaattgttataaatatacttacgcggatccccccccacaaccctaccccaaaaaataaatacaacgaataaatacgcgattggaattcatcgctacttttgaaaaaacagaatatataagttgataataagctactcttgtatatacctattcgcctagggatataatcaaacttttaaatcgacctttaaggtatatgtaacaacaaacgccacagtgatgaaaagaatcgcatactgcatgacaaataagacggacaaacagttcatttgaatgtgatcaccacatgctggcgtataaaatgctgtgaaatatacttgagcagtagcactcggcatggaccacgttaatatcatgtcaaattttcctatgcccgtatccagccaatcgatcgaatatagtttatttacccataggacgccaataataggaatgacaattaatcgaaagcatgtcatcaataaggcggatttaataaatccaggtggcaatgacttaatttctaatcttgccaacgttccgccaagtaatagaagccccaatggaacacatgcatttccaatatactctgtaaaatccattaaaaaattcagaacaggttctccatcaggcgccttatgaacgtgaacatatgtcgttacgaagcatgctttaacccagggaattaatgcacatattattcctagtattgcccccagagatgctggcctgaggcaatttataataaagtactgcaaccatttgagattgtgtctctctataaagaaggagaggctacccctcccgtcggtggccatattagtgcaattttcttcttcgatggaactttcatcggtataaccagtgtgcacattaccaatacttgcgttcctgcttccaacttcttcagtcaaggatagtggtcttgataaatctaattcaccttgccttattttttcggcggcactgtatttggaaatcaactcattcatatccgctttcctttttcttctataacttctgccatcgctattttttgatatacgactatatgagagggaactgccatctattcgcgagaactccaatgcgcctgggcttgaataagtcgaggaaaccctatatatttcagcatgcggaaggtcactttcaaatttatgggatgcaccatttgattctttatagggtttgatgtagccagtaaaaccttcgtagaatgcctgcggtgtcatttcatttgtagtaatagagttacaagacaaatcgctattacttctcgcatcttccgattgataggcatttgtaggacgtgtgatattaggtaactttgttatttcagtaagtttgcgatcgtcgatagcgggacttactgacggagtaatattctcactatctggttcttttgtatctctaaaatcaagtccgaccactctccacattccaaaattcatcattaggaaactttgaataaataaaaaaatgcaggaataagcaacacctttatcagcttcttcagcagtaaaaatggagccgttacccatgctctgaatataggcaataggtaaatctgatatatttggaaagaaacccgcaaatatgagcccccagaagaattttttgggcacagtcgtagcaaatgtagtaaataaggcgcccgtggcacctaaaacaaacaagataaaagctgaaagtattatcactccaatctcctttatatccctccatgaaatattggacacaattttgttgaaggtcaaacaaggcaaaatagcgttaacaaccatatttgatatacctttcgcattttccatggaaacaatatcgaacttagctaccaaatagccaacaagcataatggtgtaaattttaaatataggttttaatgcaatgtaaatagcggcacccagagaaagggacatcttggttcatttattgtagtactagaaaatcgtttccaccatataaaaatgatagaccttgatcagacacatgtagaattaccgatagaagaaatactatatgagtactgtaacttgttttacctcttatacgttacacactttgatgtaaatatgactcaccttatgtaccagacattgacccaaaaatacagatatacaaaaggtgaaaaaagatatagtagttcctcgacgtatgcctacggggaaaacaatatagatggaattctataacaccgacagtgatgtttctcctgaaatttgtgccaaatagcgccgcggaaagtcggcacattttgcaacatggacttcggaggtctgatatcatcccgtaaccttctcgtaatgcatcagattctggtcatgcttgttcaatatacatcctacgtgcacaacgaacaatagctttctcggtatcttattcgattatccccgaagtttcttgaaacggcaatatccttttaccctatcccgggcgaagaaccccgtcacagtgcattactttattcccactatagggataacaggggcgattgtgtacgaataactagattgtatttagataactaagatatatgataagtgcgtaaaaatggatatatctatacatatatatcactaagtgcataaagtctttgtattttcgctttcctagctgaccagtaaaagatcttgttttttaactgatggataaatagtaatttataactgaatagagcaaaagttgggaaaatagaaaatagaaaacagaaaaggagcgaaattttatctcattacgaaatttttctcatttaagttatttctttttttgagagaaaaattggttctctacagcagaaatgatggcaggtacaacttctgggttggccaaagtagttaggtcacctagctgttcggcttcgttagaagcaacctttcttagaactcttctcataatctttcctgaccttgttcttggtagatctctaactagaataatggtttttggtgaggcgaaaggaccaatctcacccctaacttgtaagatcaattctctacgtaaattatctggtgtgatgtgttctgcatcaccttcagtagcgttgttttgtagataaccatcttttagggaaacatatgcaacgacggtttgaccggtcaattcatctggaataccgacaacagcagcttccgagacgttttcgtgatttgagatagatgcttcaatttctgatgtggataatctatgaccggaaacatttacaacgtcgtcaactctacccctgatccagtagtaaccatcatgatctctaccagcaccatcacctgtgaaatagtgaccaggataaggtttcaagtaagtatccatgtaacggtcgtggtggttccaaacagatctagccattgatggccatggtgatttaacggcaaggacaccttcgacatcattaccttctaattccacacctgtaacagggtcaatgatacaagcgttaataccaaagaatggcacggtagcagaaccaggttttgttgggacagcacctgccaaaggagcaattaaatgagaaccagactctgtttgccacatagtgtcacaaatgacacagtttttgttacccactttttcatgataccattcccataagtctggagagattggttcaccgacggaacccaagacacgtaatgaggaagtgtcatatttggcaatttcggcttcacctacacgtttgattaatcttaaagcagttggagccacatagaaatgggtagccttgtgacgttggataattctccaatatctaccataatctgggtaggcaggagtggattcgaaaattattgaggcggtacccaaggttaatggaccatatagagcataggtgtgacccgtgatccagccgacgtcaccggcagtgaagagaacatcttctgggtgaatatcaaaaacgtatctagttgttaaagcggcacctaataaataaccacctgtagtgtgaacgacaccctttggagaaccagtggaaccggaagtgtataataaaaatagaggatcttcagcgtcacatgaaacaggaggtaggtaagttctctgcttagcggcctcctcatgccaccagtaatctctaccggccttcattggaataccttcagtaccagttctttggaaaaccaagatacgggaaaccaaatcgactccgttcaaaccttcgtcaacaatttttttagtgttgatggtcttaccacctcttttaccttcatcacaagtgatgaccactttagaattagcgtcaacgacacgatctttcaacgaaccagcggagaacccagcaaagacaacagagtgaatagcaccaatacgagccacagccaacatagcaatgaccgcttctggaatcattggcaaatagatagccactgtgtcacctttcttaacgccccagctttttaagacaccagcgatttgggaaacttttctgagtaattcaccaaatgtgatgattttgttgtcggattcgtcatcagcttcatagatcaaagctggcttgtcgggattagcaaaggcatgtctgtcaacacaattgtatgatgcattcaatttaccgttcaaaaaccatgcaacatcaccattgttcaatgaaccagattgaactttggtgtatggagcatcccaatgcaagtattccttagccatcttatcaaagaatttttctggctcattgatagattgttgatacatttcttgataatgttgcatatcagtaacgtaacccttgccgggttggctgttgtaaaaatgttgaggagccttaagagcctttacgttgtgagcttcataaactactttatgttccttgattgtcatattttattattgtattgatttactttcctgtattctgtttgtgtataacaatcactaaccgcggagacacacaattcggaattcgaatactatatatatatatattttaaggtagaggtatatataaggtttgatcaggctaaacgtgcggtgcgatatcgttgctaaaattcagaacactgttttcaatctcgaagtaaaaaacgataaaaattatcaacaaaaccagtgacgaagaagttcagtcacgaaacttttttgcctcgttcaaaaaaaaaaagccagcggaatcggctaccgaatatcggcaataacgcttcggccccgggaaacgcatatgaataattttaagttagttttatgctatacagcgggtggctacgtgtaatgtatttaatgtttatatttactgatttatgacatcgatgagggagatcaattcttgcaatcgcgccaattcgttgcgatcagtgccctctctttcgtaattattcactgaaactatcttgccagttattgtgtttcccgagaggatggcgccattactgaaggtattactagttgtgttatcgctactggaaggcgtcgcagacttttccctcttcagttccttgccacgaaagtaaatagtatcttcgaatttgtaatccttaaactcttcggttggtccttgatactcggtatagaaaggcatgaagctcacggtgtaagcatctagattcacggcatctttggtcattgcgtatttgacctacttactgtattagtacacacttgtattttcgggccttgatggttttgtttcactgcttgtttgcaattggttgttgttcctaacgcgttttgtcatttttcgatgaaggtcgaacggaaagaactaaaaaagactaggggaatggaatgcggaatagcagtgcatatttcaggatgaatggaaaaacacatctgcagcaacaatgaaaaaccttagtggatttaaacttctcacaggaaatatcgatcaaagcaatgggctagccaaataaaaaaaaaactgtaggcacaaaaagcagcatacgtcattcgcaaaaaagaaggtcctacccggattcgaaccggggttgtccggatcaaaaccgaaagtgataaccactacactataggaccggaacttcttgatgatacgaacgattaaaattgttgacgttctcttctttttttcatatttgagtagatctgatgcgcaatgtctatacaacctggcagacaattgtctaaataatattttgtaggaataagagtccactatcgtctatcaactagtagtcacactaccaatatattatcatatacggtgttaagatgatggcataaggtatgagaaactgtcatcgaagctgaaatgcaaggattgatagtgtaataggataatgaaacatataaaacgaaaagagaaataatcataacattatttcctagagtagcgattccccttcgcgtattcttacatcttcgaagagaacttctggtgtaagtataataaatattatagctctatcgaatggtgcaattatttaccaaattctcaataggaatccataatactacatacgatactaatattctagtatttttatacttattatttcttttttattacaccagcaatcgttgcaaattatcttctgatagaatttctgagggtatcctaaacttatgccattttcttggactgtaaatcatacttggatgttgtgcattagtcaataatcggttcttgttccaacgattacatgtaaatgaagggagaaataattatggtaaatcatgcggcggtccttttggtgatgcagtatccatagtcactacataacaatcttagtcaccttgtattgattcaccacataatcctgcagagcccgctatgtccttaatctgcgcgataactctcctacccctgaattttgagagcgccatagcaaaccgataaagctggcacaattaaaggtatcggtgttgtcagaattaggtgcctcctgcttttttttttttcctgctcttatatccgttatatccgaatgatttttatcgcttgtttaaaaaatactttcccgatatatatatatagtctccctttaaatttgtttccggtaagtttttaacaccaataaatgaaaagaaatgactacggtgatgaatatgagccgcgcattgaatcaggttatgtaagtatcagaacccctaattatgatgtcactcttacccttcgatggctaagcggcgactgggatgccgggaaaagctctacaaatctactaaaaaagtcaaatatacagctgtaaacttctttcctcgtctacatcatggtaacgattgttcaatctttacttcgtgtctttttttttttctatgtactttctattccaacctatgtgaagactaaaattcaccttagtaaacgtaaagacaatgacgataggtgcctaaatccaatgaaaagagcacaaacagtttccatataattaggagcagtctacaatcaagcagtaaattttggtatcataaacgacccgctgagacctttccattgggtcaggtcgagaactgtagttactcgaaaatcagatcatccacacgctgttgaactcgaaaacagtagcactgtcactgtaagctagtgttcattttaaacgtcttgccgaattttttcttcgaagaaaagtattgcaatggactctatacttctgagcagcaattaaggaaaacagggtaggtaacctctggggttgatatctggataaactggaaccatattagcgagatgatgcactttacatagattccgcgagtaccttaatactgctggtgcaccacgataatgattacttcttcaatatcaattagtttgccaggatataccttatccaatttagcgtgacgatcttaaaggcgtttttatgtttattcgctaaaacccttcttattgtcattttcgttaacatactatctaacgtatttctgtttgtcagtaattttcagttaatggatggtatcagacgaaaattaaataaatcaccttctgctttataagcaagatataaaaaaaaatatggatcgattgattcatttccataatgatcaatatataataataataggactgctagctaatatatactcaatatgatttgttcatattcttcgcaggtatatataaccatcaagtaatacatatttaacttagctgcatcaccgttgagccttttgttgaacacttcccctctctatcataaaatcaaccatatagaaacgcatagagtgtaaacattgatatgcgatgccaaaacacttgatttgttactatggaacacacagcaatatgcatacactacttgttccattgctgttgcaattccattggatagaactcctgcattgtcctcatttagtgctcaggaaaaggtttacatatttctttctgacttttcagaaaaaaaatttgtgaggctgtcactgtatatcacgtaatacacatataagtaattggatttatagtaaaaagaattctcatgttgggcacaactatctcgttgccaaattttttaccatattaaaacgacccatgtaatataattggaaaaattagtatactgggaacaatcttgcggcacaccgcttgaacgaaacgttcgtaaaaatatttataattcttattattattatttattattattataatatatataatttaataatcttaatatttattatcattgtttcatatttttttttataaatatttatttaaataaaaaatattaaagagtattcaaaaaagtcttactgtgggtaatggatatttcctcatgtttgccgctctgatggtgcggaaaaaactgctccatgaagcaaactgtccgggcaaatcctttcacgctcgggaagctttgtgaaagcccttctctttcaacccatctttgcaacgaaaaaaaaaaaaaaaataaaaaataaaaagaccaaatagtaaatagtaacttacatacattagtaaatggtacactcttacacactatcatcctcatcgtatattataatagatatatacaatacatgtttttacccggatcatagaattcttaagacaaataaaatttatagagacttgttcagtctacttctctctaaactaggccccggctcctgccagtacccacttagaaagaaataaaaaacaaatcagacaacaaaggcttaatctcagcagatcgtaacaacaaggctactctactgcttacaataccccgttgtacatctaagtcgtatacaaatgatttatccccacgcaaaatgacattgcaattcgccagcaagcacccaaggcctttccgccaagtgcaccgttgctagcctgctatggttcagcgacgccacaaggacgccttattcgtatccatctatattgtgtggagcaaagaaatcaccgcgttctagcatggattctgacttagaggcgttcagccataatccagcggatggtagcttcgcggcaatgcctgatcagacagccgcaaaaaccaattatccgaatgaactgttcctctcgtactaagttcaattactattgcggtaacattcatcagtagggtaaaactaacctgtctcacgacggtctaaacccagctcacgttccctattagtgggtgaacaatccaacgcttaccgaattctgcttcggtatgataggaagagccgacatcgaagaatcaaaaagcaatgtcgctatgaacgcttgactgccacaagccagttatccctgtggtaacttttctggcacctctagcctcaaattccgagggactaaaggatcgataggccacactttcatggtttgtattcacactgaaaatcaaaatcaagggggcttttacccttttgttctactggagatttctgttctccatgagccccccttaggacatctgcgttatcgtttaacagatgtgccgccccagccaaactccccacctgacaatgtcttcaacccggatcagccccgaatgggaccttgaatgctagaacgtggaaaatgaattccagctccgcttcattgaataagtaaagaaactataaaggtagtggtatttcactggcgccgaagctcccacttattctacaccctctatgtctcttcacaatgtcaaactagagtcaagctcaacagggtcttctttccccgctgattctgccaagcccgttcccttggctgtggtttcgctagatagtagatagggacagtgggaatctcgttaatccattcatgcgcgtcactaattagatgacgaggcatttggctaccttaagagagtcatagttactcccgccgtttacccgcgcttggttgaatttcttcactttgacattcagagcactgggcagaaatcacattgcgtcaacatcactttctgaccatcgcaatgctatgttttaattagacagtcagattccccttgtccgtaccagttctaagttgatcgttaattgtagcaagcgacggtctacaagagacctaccaaggccgtctacaacaaggcacgcaagtagtccgcctagcagagcaagccccaccaagcagtccacaagcacgcccgctgcgtctgaccaaggccctcactacccgacccttagagccaatccttatcccgaagttacggatctattttgccgacttcccttatctacattattctatcaactagaggctgttcaccttggagacctgctgcggttatcagtacgacctggcatgaaaactattccttcctgtggattttcacgggccgtcacaagcgcaccggagccagcaaaggtgctggcctcttccagccataagaccccatctccggataaaccaattccggggtgataagctgttaagaagaaaagataactcctcccagggctcgcgccgacgtctccacattcagttacgttaccgtgaagaatccatatccaggttccggaatcttaaccggattccctttcgatggtggcctgcataaaatcaggcctttgaaacggagcttccccatctcttaggatcgactaacccacgtccaactgctgttgacgtggaacctttccccacttcagtcttcaaagttctcatttgaatatttgctactaccaccaagatctgcactagaggccgttcgacccgaccttacggtctaggcttcgtcactgacctccacgcctgcctactcgtcagggcatcatatcaaccctgacggtagagtataggtaacacgcttgagcgccatccattttcagggctagttcattcggccggtgagttgttacacactccttagcggattccgacttccatggccaccgtccggctgtctagatgaactaacaccttttgtggtgtctgatgagcgtgtattccggcaccttaactctacgttcggttcatcccgcatcgccagttctgcttaccaaaaatggcccactaaaagctcttcattcaaatgtccacgttcaattaagtaacaaggacttcttacatatttaaagtttgagaataggtcaaggtcatttcgaccccggaacctctaatcattcgctttacctcataaaactgatacgagcttctgctatcctgagggaaacttcggcaggaaccagctactagatggttcgattagtctttcgcccctatacccaaattcgacgatcgatttgcacgtcagaaccgctacgagcctccaccagagtttcctctggcttcaccctattcaggcatagttcaccatctttcgggtcccaacagctatgctcttactcaaatccatccgaagacatcaggatcggtcgattgtgcacctcttgcgaggccccaacctacgttcactttcattacgcgtatgggttttacacccaaacactcgcatagacgttagactccttggtccgtgtttcaagacgggcggcatataaccattatgccagcatccttgacttacgtcgcagtcctcagtcccagctggcagtattcccacaggctataatacttaccgaggcaagctacattcctatggatttatcctgccaccaaaactgatgctggcccagtgaaatgcgagattcccctacccacaaggagcagagggcacaaaacaccatgtctgatcaaatgcccttccctttcaacaatttcacgtactttttcactctcttttcaaagttcttttcatctttccatcactgtacttgttcgctatcggtctctcgccaatatttagctttagatggaatttaccacccacttagagctgcattcccaaacaactcgactcttcgaaggcactttacaaagaaccgcactcctcgccacacgggattctcaccctctatgacgtcctgttccaaggaacatagacaaggaacggccccaaagttgccctctccaaattacaactcgggcaccgaaggtaccagatttcaaatttgagcttttgccgcttcactcgccgttactaaggcaatcccggttggtttcttttcctccgcttattgatatgcttaagttcagcgggtactcctacctgatttgaggtcaaactttaagaacattgttcgcctagacgctctcttcttatcgataacgttccaatacgctcagtataaaaaaagattagccgcagttggtaaaacctaaaacgaccgtacttgcattatacctcaagcacgcagagaaacctctctttggaaaaaaaacatccaatgaaaaggccagcaatttcaagttaactccaaagagtatcactcactaccaaacagaatgtttgagaaggaaatgacgctcaaacaggcatgccccctggaataccaaggggcgcaatgtgcgttcaaagattcgatgattcacggaattctgcaattcacattacgtatcgcatttcgctgcgttcttcatcgatgcgagaaccaagagatccgttgttgaaagtttttaatattttaaaatttccagttacgaaaattcttgtttttgacaaaaatttaatgaatagataaaattgtttgtgtttgttacctctgggccccgattgctcgaatgcccaaagaaaaagttgcaaagatatgaaaactccacagtgtgttgtattgaaacggttttaattgtcctataacaaaagcacagaaatctctcaccgtttggaatagcaagaaagaaacttacaagcctagcaagaccgcgcacttaagcgcaggcccggctggactctccatctcttgtcttcttgcccagtaaaagctctcatgctcttgccaaaacaaaaaaatccattttcaaaattattaaatttctttaatgatccttccgcaggttcacctacggaaaccttgttacgacttttagttcctctaaatgaccaagtttgtccaaattctccgctctgagatggagttgcccccttctctaagcagatcctgaggcctcactaagccattcaatcggtactagcgacgggcggtgtgtacaaagggcagggacgtaatcaacgcaagctgatgacttgcgcttactaggaattcctcgttgaagagcaataattacaatgctctatccccagcacgacggagtttcacaagattaccaagacctctcggccaaggttagactcgctggctccgtcagtgtagcgcgcgtgcggcccagaacgtctaagggcatcacagacctgttattgcctcaaacttccatcggcttgaaaccgatagtccctctaagaagtggataaccagcaaatgctagcaccactatttagtaggttaaggtctcgttcgttatcgcaattaagcagacaaatcactccaccaactaagaacggccatgcaccaccacccacaaaatcaagaaagagctctcaatctgtcaatccttattgtgtctggacctggtgagtttccccgtgttgagtcaaattaagccgcaggctccactcctggtggtgcccttccgtcaattcctttaagtttcagccttgcgaccatactccccccagaacccaaagactttgatttctcgtaaggtgccgagtgggtcattaaaaaaacaccacccgatccctagtcggcatagtttatggttaagactacgacggtatctgatcatcttcgatcccctaactttcgttcttgattaatgaaaacgtccttggcaaatgctttcgcagtagttagtcttcaataaatccaagaatttcacctctgacaattgaatactgatgcccccgaccgtccctattaatcattacgatggtcctagaaaccaacaaaatagaaccaaacgtcctattctattattccatgctaatatattcgagcaatacgcctgctttgaacactctaattttttcaaagtaaaagtcctggttcgccaagagccacaaggactcaaggttagccagaaggaaaggccccgttggaaatccagtacacgaaaaaatcggaccggccaaccgggcccaaagttcaactacgagctttttaactgcaacaactttaatatacgctattggagctggaattaccgcggctgctggcaccagacttgccctccaattgttcctcgttaaggtatttacattgtactcattccaattacaagacccgaatgggccctgtatcgttatttattgtcactacctccctgaattaggattgggtaatttgcgcgcctgctgccttccttggatgtggtagccgtttctcaggctccctctccggaatcgaacccttattccccgttacccgttgaaaccatggtaggccactatcctaccatcgaaagttgatagggcagaaatttgaatgaaccatcgccagcacaaggccatgcgattcgaaaagttattatgaatcatcaaagagtccgaagacattgattttttatctaataaatacatctcttccaaagggtcgagattttaagcatgtattagctctagaattaccacagttataccatgtagtaaaggaactatcaaataaacgataactgatttaatgagccattcgcagtttcactgtataaattgcttatacttagacatgcatggcttaatctttgagacaagcatatgactactggcaggatcaaccagataactatcttaaaagaagaagcaacaagcagtaaaaaagaaagaaaccgaaatctctttttttttttcccacctattccctcttgctagaagatacttattgagtttggaaacagctgaaattccagaaaaattgctttttcaggtctctctgctgccggaaatgctctctgttcaaaaagcttttacactcttgaccagcgcactccgtcaccataccatagcactctttgagtttcctctaatcaggttccaccaaacagataccccggtgtttcacggaatggtacgtttgatatcgctgatttgagaggaggttacacttgaagaatcacagtcttgcgaccggctattcaacaaggcattcccccaagtttgaattctttgaaatagattgctattagctagtaatccaccaaatccttcgctgctcaccaatggaatcgcaagatgcccacgatgagactgttcaggttaaacgcaaaagaaacacactctgggaatttcttcccaaattgtatctctcaatacgcatcaacccatgtcaattaaacacgctgtatagagactaggcagatctgacgatcacctagcgactctctccaccgtttgacgaggccatttacaaaaacataacgaacgacaagcctactcgaattcgtttccaaactcttttcgaacttgtcttcaactgctttcgcatgaagtacctcccaactacttttcctcacacttgtactccatgactaaaccccccctcccattacaaactaaaatcttacttttattttcttttgccctctctgtcgctctgccttaactacgtatttctcgccgagaaaaacttcaatttaagctattctccaaaaatcttagcgtatattttttttccaaagtgacaggtgccccgggtaacccagttcctcactattttttactgcggaagcggaagcggaaaatacggaaacgcgcgggaacatacaaaacatacaaaatatacctttctcacacaagaaatatatgctacttgcaaaatatcataccaaaaaacttttcacaaccgaaaccaaaaccaacggatatcatacattacactaccaccattcaaactttactactatcctcccttcagtttccctttttctgcctttttcggtgacggaaatacgcttcagagaccctaaagggaaatccatgccataacaggaaagtaacatcccaatgcggactataccaccccaccacactcctaccaataacggtaactattctatgttttcttactcctatgtctattcatctttcatctgactacctaatactatgcaaaaatgtaaaatcatcacacaaaacataaacaatcaaaatcagccatttccgcaccttttcctctgtccactttcaaccgtccctccaaatgtaaaatggcctatcggaatacattttctacatcctaactactataaaacaacctttagacttacgtttgctactctcatggtctcaatactgccgccgacattctgtcccacatactaaatctcttcccgtcattatcgcccgcatccggtgccgtaaatgcaaaacaaataccatctatgtcttccacaccatcattttactatgcctgccaccatccatttgtcttttgcaccatatcttcataacctgtcaccttgaaactacctctgcatgccacctaccgaccaactttcatgttctgtttcgacctacctcttgtaaatgacaaatcacctttttcatcgtatgcaccttattctccacatcacaatgcactattgcttttgctttttcacctgtcatatcctattgctattagatgaaatataataaaaattgtcctccacccataacacctctcactcccacctactgaacatgtctggaccctgccctcatatcacctgcgtttccgttaaactatcggttgcggccatatctaccagaaagcaccgtttcccgtccgatcaactgtagttaagctggtaagagcctgaccgagtagtgtagtgggtgaccatacgcgaaactcaggtgctgcaatctttatttctttttttttttttttttttttttttttttctagtttcttggcttcctatgctaaatcccataactaacctaccattcgattcagaaaaattcgcactatccagctgcactcttcttctgaagagttaagcactccattatgctcattgggttgctactacttgatatgtacaaacaatattctcctccgatattcctacaaaaaaaaaaaaaaaaacactccggttttgttctcttccctccatttccctctcttctacggttaatactttcctcttcgtctttttctacaccctcgtttagttgcttcttattccttcccgctttcctgcactaacattttgccgcattacactatatgatcgtagtacatcttacaactccgcataccgcgtcgccgcgtcgccgcgtcgccaaaaatttacttcgccaaccattccatatctgttaagtatacatgtatatattgcactggctattcatcttgcacttttcctctttcttcttcccagtagcctcatccttttacgctgcctctctggaacttgccatcatcattccctagaaactgccatttacttaaaaaaaaaaaaaaaaaaaaaatgtccccactgttcactgttcactgttcacttgtctcttacatctttcttggtaaaatcgtagttcgtagtattttttttcatatcaaaggcatgtcctgttaactataggaaatgagcttttctcaattctctaaacttatacaagcactcatgtttgccgctctgatggtgcggaaaaaactgctccatgaagcaaactgtccgggcaaatcctttcacgctcgggaagctttgtgaaagcccttctctttcaacccatctttgcaacgaaaaaaaaaaaaaaaataaaaaataaaaagaccaaatagtaaatagtaacttacatacattagtaaatggtacactcttacacactatcatcctcatcgtatattataatagatatatacaatacatgtttttacccggatcatagaattcttaagacaaataaaatttatagagacttgttcagtctacttctctctaaactaggccccggctcctgccagtacccacttagaaagaaataaaaaacaaatcagacaacaaaggcttaatctcagcagatcgtaacaacaaggctactctactgcttacaataccccgttgtacatctaagtcgtatacaaatgatttatccccacgcaaaatgacattgcaattcgccagcaagcacccaaggcctttccgccaagtgcaccgttgctagcctgctatggttcagcgacgccacaaggacgccttattcgtatccatctatattgtgtggagcaaagaaatcaccgcgttctagcatggattctgacttagaggcgttcagccataatccagcggatggtagcttcgcggcaatgcctgatcagacagccgcaaaaaccaattatccgaatgaactgttcctctcgtactaagttcaattactattgcggtaacattcatcagtagggtaaaactaacctgtctcacgacggtctaaacccagctcacgttccctattagtgggtgaacaatccaacgcttaccgaattctgcttcggtatgataggaagagccgacatcgaagaatcaaaaagcaatgtcgctatgaacgcttgactgccacaagccagttatccctgtggtaacttttctggcacctctagcctcaaattccgagggactaaaggatcgataggccacactttcatggtttgtattcacactgaaaatcaaaatcaagggggcttttacccttttgttctactggagatttctgttctccatgagccccccttaggacatctgcgttatcgtttaacagatgtgccgccccagccaaactccccacctgacaatgtcttcaacccggatcagccccgaatgggaccttgaatgctagaacgtggaaaatgaattccagctccgcttcattgaataagtaaagaaactataaaggtagtggtatttcactggcgccgaagctcccacttattctacaccctctatgtctcttcacaatgtcaaactagagtcaagctcaacagggtcttctttccccgctgattctgccaagcccgttcccttggctgtggtttcgctagatagtagatagggacagtgggaatctcgttaatccattcatgcgcgtcactaattagatgacgaggcatttggctaccttaagagagtcatagttactcccgccgtttacccgcgcttggttgaatttcttcactttgacattcagagcactgggcagaaatcacattgcgtcaacatcactttctgaccatcgcaatgctatgttttaattagacagtcagattccccttgtccgtaccagttctaagttgatcgttaattgtagcaagcgacggtctacaagagacctaccaaggccgtctacaacaaggcacgcaagtagtccgcctagcagagcaagccccaccaagcagtccacaagcacgcccgctgcgtctgaccaaggccctcactacccgacccttagagccaatccttatcccgaagttacggatctattttgccgacttcccttatctacattattctatcaactagaggctgttcaccttggagacctgctgcggttatcagtacgacctggcatgaaaactattccttcctgtggattttcacgggccgtcacaagcgcaccggagccagcaaaggtgctggcctcttccagccataagaccccatctccggataaaccaattccggggtgataagctgttaagaagaaaagataactcctcccagggctcgcgccgacgtctccacattcagttacgttaccgtgaagaatccatatccaggttccggaatcttaaccggattccctttcgatggtggcctgcataaaatcaggcctttgaaacggagcttccccatctcttaggatcgactaacccacgtccaactgctgttgacgtggaacctttccccacttcagtcttcaaagttctcatttgaatatttgctactaccaccaagatctgcactagaggccgttcgacccgaccttacggtctaggcttcgtcactgacctccacgcctgcctactcgtcagggcatcatatcaaccctgacggtagagtataggtaacacgcttgagcgccatccattttcagggctagttcattcggccggtgagttgttacacactccttagcggattccgacttccatggccaccgtccggctgtctagatgaactaacaccttttgtggtgtctgatgagcgtgtattccggcaccttaactctacgttcggttcatcccgcatcgccagttctgcttaccaaaaatggcccactaaaagctcttcattcaaatgtccacgttcaattaagtaacaaggacttcttacatatttaaagtttgagaataggtcaaggtcatttcgaccccggaacctctaatcattcgctttacctcataaaactgatacgagcttctgctatcctgagggaaacttcggcaggaaccagctactagatggttcgattagtctttcgcccctatacccaaattcgacgatcgatttgcacgtcagaaccgctacgagcctccaccagagtttcctctggcttcaccctattcaggcatagttcaccatctttcgggtcccaacagctatgctcttactcaaatccatccgaagacatcaggatcggtcgattgtgcacctcttgcgaggccccaacctacgttcactttcattacgcgtatgggttttacacccaaacactcgcatagacgttagactccttggtccgtgtttcaagacgggcggcatataaccattatgccagcatccttgacttacgtcgcagtcctcagtcccagctggcagtattcccacaggctataatacttaccgaggcaagctacattcctatggatttatcctgccaccaaaactgatgctggcccagtgaaatgcgagattcccctacccacaaggagcagagggcacaaaacaccatgtctgatcaaatgcccttccctttcaacaatttcacgtactttttcactctcttttcaaagttcttttcatctttccatcactgtacttgttcgctatcggtctctcgccaatatttagctttagatggaatttaccacccacttagagctgcattcccaaacaactcgactcttcgaaggcactttacaaagaaccgcactcctcgccacacgggattctcaccctctatgacgtcctgttccaaggaacatagacaaggaacggccccaaagttgccctctccaaattacaactcgggcaccgaaggtaccagatttcaaatttgagcttttgccgcttcactcgccgttactaaggcaatcccggttggtttcttttcctccgcttattgatatgcttaagttcagcgggtactcctacctgatttgaggtcaaactttaagaacattgttcgcctagacgctctcttcttatcgataacgttccaatacgctcagtataaaaaaagattagccgcagttggtaaaacctaaaacgaccgtacttgcattatacctcaagcacgcagagaaacctctctttggaaaaaaaacatccaatgaaaaggccagcaatttcaagttaactccaaagagtatcactcactaccaaacagaatgtttgagaaggaaatgacgctcaaacaggcatgccccctggaataccaaggggcgcaatgtgcgttcaaagattcgatgattcacggaattctgcaattcacattacgtatcgcatttcgctgcgttcttcatcgatgcgagaaccaagagatccgttgttgaaagtttttaatattttaaaatttccagttacgaaaattcttgtttttgacaaaaatttaatgaatagataaaattgtttgtgtttgttacctctgggccccgattgctcgaatgcccaaagaaaaagttgcaaagatatgaaaactccacagtgtgttgtattgaaacggttttaattgtcctataacaaaagcacagaaatctctcaccgtttggaatagcaagaaagaaacttacaagcctagcaagaccgcgcacttaagcgcaggcccggctggactctccatctcttgtcttcttgcccagtaaaagctctcatgctcttgccaaaacaaaaaaatccattttcaaaattattaaatttctttaatgatccttccgcaggttcacctacggaaaccttgttacgacttttagttcctctaaatgaccaagtttgtccaaattctccgctctgagatggagttgcccccttctctaagcagatcctgaggcctcactaagccattcaatcggtactagcgacgggcggtgtgtacaaagggcagggacgtaatcaacgcaagctgatgacttgcgcttactaggaattcctcgttgaagagcaataattacaatgctctatccccagcacgacggagtttcacaagattaccaagacctctcggccaaggttagactcgctggctccgtcagtgtagcgcgcgtgcggcccagaacgtctaagggcatcacagacctgttattgcctcaaacttccatcggcttgaaaccgatagtccctctaagaagtggataaccagcaaatgctagcaccactatttagtaggttaaggtctcgttcgttatcgcaattaagcagacaaatcactccaccaactaagaacggccatgcaccaccacccacaaaatcaagaaagagctctcaatctgtcaatccttattgtgtctggacctggtgagtttccccgtgttgagtcaaattaagccgcaggctccactcctggtggtgcccttccgtcaattcctttaagtttcagccttgcgaccatactccccccagaacccaaagactttgatttctcgtaaggtgccgagtgggtcattaaaaaaacaccacccgatccctagtcggcatagtttatggttaagactacgacggtatctgatcatcttcgatcccctaactttcgttcttgattaatgaaaacgtccttggcaaatgctttcgcagtagttagtcttcaataaatccaagaatttcacctctgacaattgaatactgatgcccccgaccgtccctattaatcattacgatggtcctagaaaccaacaaaatagaaccaaacgtcctattctattattccatgctaatatattcgagcaatacgcctgctttgaacactctaattttttcaaagtaaaagtcctggttcgccaagagccacaaggactcaaggttagccagaaggaaaggccccgttggaaatccagtacacgaaaaaatcggaccggccaaccgggcccaaagttcaactacgagctttttaactgcaacaactttaatatacgctattggagctggaattaccgcggctgctggcaccagacttgccctccaattgttcctcgttaaggtatttacattgtactcattccaattacaagacccgaatgggccctgtatcgttatttattgtcactacctccctgaattaggattgggtaatttgcgcgcctgctgccttccttggatgtggtagccgtttctcaggctccctctccggaatcgaacccttattccccgttacccgttgaaaccatggtaggccactatcctaccatcgaaagttgatagggcagaaatttgaatgaaccatcgccagcacaaggccatgcgattcgaaaagttattatgaatcatcaaagagtccgaagacattgattttttatctaataaatacatctcttccaaagggtcgagattttaagcatgtattagctctagaattaccacagttataccatgtagtaaaggaactatcaaataaacgataactgatttaatgagccattcgcagtttcactgtataaattgcttatacttagacatgcatggcttaatctttgagacaagcatatgactactggcaggatcaaccagataactatcttaaaagaagaagcaacaagcagtaaaaaagaaagaaaccgaaatctctttttttttttcccacctattccctcttgctagaagatacttattgagtttggaaacagctgaaattccagaaaaattgctttttcaggtctctctgctgccggaaatgctctctgttcaaaaagcttttacactcttgaccagcgcactccgtcaccataccatagcactctttgagtttcctctaatcaggttccaccaaacagataccccggtgtttcacggaatggtacgtttgatatcgctgatttgagaggaggttacacttgaagaatcacagtcttgcgaccggctattcaacaaggcattcccccaagtttgaattctttgaaatagattgctattagctagtaatccaccaaatccttcgctgctcaccaatggaatcgcaagatgcccacgatgagactgttcaggttaaacgcaaaagaaacacactctgggaatttcttcccaaattgtatctctcaatacgcatcaacccatgtcaattaaacacgctgtatagagactaggcagatctgacgatcacctagcgactctctccaccgtttgacgaggccatttacaaaaacataacgaacgacaagcctactcgaattcgtttccaaactcttttcgaacttgtcttcaactgctttcgcatgaagtacctcccaactacttttcctcacacttgtactccatgactaaaccccccctcccattacaaactaaaatcttacttttattttcttttgccctctctgtcgctctgccttaactacgtatttctcgccgagaaaaacttcaatttaagctattctccaaaaatcttagcgtatattttttttccaaagtgacaggtgccccgggtaacccagttcctcactattttttactgcggaagcggaagcggaaaatacggaaacgcgcgggaacatacaaaacatacaaaatatacctttctcacacaagaaatatatgctacttgcaaaatatcataccaaaaaacttttcacaaccgaaaccaaaaccaacggatatcatacattacactaccaccattcaaactttactactatcctcccttcagtttccctttttctgcctttttcggtgacggaaatacgcttcagagaccctaaagggaaatccatgccataacaggaaagtaacatcccaatgcggactataccaccccaccacactcctaccaataacggtaactattctatgttttcttactcctatgtctattcatctttcatctgactacctaatactatgcaaaaatgtaaaatcatcacacaaaacataaacaatcaaaatcagccatttccgcaccttttcctctgtccactttcaaccgtccctccaaatgtaaaatggcctatcggaatacattttctacatcctaactactataaaacaacctttagacttacgtttgctactctcatggtctcaatactgccgccgacattctgtcccacatactaaatctcttcccgtcattatcgcccgcatccggtgccgtaaatgcaaaacaaataccatctatgtcttccacaccatcattttactatgcctgccaccatccatttgtcttttgcaccatatcttcataacctgtcaccttgaaactacctctgcatgccacctaccgaccaactttcatgttctgtttcgacctacctcttgtaaatgacaaatcacctttttcatcgtatgcaccttattctccacatcacaatgcactattgcttttgctttttcacctgtcatatcctattgctattagatgaaatataataaaaattgtcctccacccataacacctctcactcccacctactgaacatgtctggaccctgccctcatatcacctgcgtttccgttaaactatcggttgcggccatatctaccagaaagcaccgtttcccgtccgatcaactgtagttaagctggtaagagcctgaccgagtagtgtagtgggtgaccatacgcgaaactcaggtgctgcagttgttttttttttcgcgcacgaatacatcacgcagcctcgccttgacactgctcaagggataaggggaaggagctgagatagaactgagttggagcgttgcagcggcacgagcagtgaaaagagcgaagagaagagaagcagataaaagaccaaagtagcgatgatacttcgatgtttggagcgatttttcctatgtgaatattagaaatcatatgttttgtatcagctgaacagtgaatgatgtgctcaatactcaaattcatctttttgtttgctaaaaatagcttaactggcacatcatgaaaaggatgtagaaattatagagtatatttactactaagaactatataaaaacacagtgtgatgaaaagtcactgatcaggctttaaccaccgtagacgccagaaaaaacagacctaatctgatccatgccgtagccggagtacaaacataattgtagcaaaatacgcgatttttgagggtttaggtagccagatccaatggcgtactctggggcatcatctggaggaactgtaccatctgctgttcttctgctgtgaacaattggtataccatactcttcataaagttgttcgtttacaatactacccgtagcagtccaggaaccagctccagaacccgccaacacgataccttttgcgcccaggtccttgacggcctttactattagctcaggattcaagccttgataggagtacagaataatgacttctggaatttccgaagggtctgtgaggttggaaatgtcaaaaaattgccatccatttggcttgactggtgggtagtaaaactccacgtcatcatttgaaaagtaacctaaatatccctgttcatccgctctgaatgtatctaaagagttggcattcattttcgttgtccaaaacccagaggcaatacgatcgtttagagtgatcatcgtgccacgacccagtgatttctcagaagcagcaatagacactgcttgatataaattcattgggccatcagcagacgtggcagtggctggacgcatagcgcctgcgatacatactggcttctctgaatttatggtcaaatctaagaagaaagctgtctcctccatagtgtcggtcccatgagtgacaaccgcaccagcgtagtcatcagaggctagtgcctcggagataccgtgatacaatgggatcagatgcgtatagtttaaagaatttgaaccaacgttagacacttgaagatagtccagatttgccttctcagctaaagatgggacggcttctattaaatcatttacggttaatcccacgctataacccgccgttgttgcacttgtcgaacccttggaagcgatagtaccgccggtaccaaaaattttgattgatggcaaagaagaattcttctcttcacgaatttttagtagtggagcaccactggacattgcgacaaagagagaaagtaaaagggtatttaaagatctcatagttggaggttggtgagtaccagattgcttacaaaagaatagcgagccaacatttgctctgcctcaggcctcttggtgctgcttgaagactcatcttatatggcttttgtatgtcatgatttgttcttgtacattatgtgttgatattaaacaaattgatttttttttttttgcgatagcaagcagataatgaaagagacaaggacttggaacatccgataagactgcgccgatatcgatcttacagtccttcccttgtgtcatgactttcggaaaagcatcctcgtcgactggtagtttgctgtctgtcacgtgctgaagggtctgatacatttttttaaagataagagacggggtttacccttcggaggactaagcgagatctccaagtaaagatctcgcttatcaagaaagcagccaagtgtggaacgtccttttttttggtttcaaaaagatattcaacagtttacactgcagctttaattgcctcaaaaggatatcatgaggtgatctagggtcagaagggaaagattacagcatcttgagttgaatcacatctgcaaaaggtggtattattgacgttgctcttccttaatggaaactcatggggtttggaaaggaggtgcggtaatctatttttttcgaacacaaaacctaaccttgaaaagaaactgtccaatttcattgaacttacctcagaacgggccggagtctttgctttcagtctaacatggtctaatttcttcgaaaagcttcatttaattgttagactgtggttttacaaggaaaaaaccagtgctatactgaagcgatacccagaactaattaccttgtgtgacgattcggctcagcgaaacggacatggtaaaattgggaatttgaaagcaggcagcagccttgtacagcgacatgacgataggtttagaatccccatcacgtacgagttgaagaattctacgaaggctctatgcgttattcctctatcggtataaagtgtagcgttgtaggggggatattggtggtttagttgaatttgcgcaacgaaattatagaactcataaaagttcaattcaatacttgaaacccttaacgttggttcgaccatcaattgtttggacataatagttttattctgcggccgatttcaaaatttagtaaatcaaatgttgaagcatcaccagtaggatgaccactcccatgacaaaactccgtcccaaagatagcttgatcatcctaagcgggtcgcattttactatccccagttccgaagaataacaaggctcaatgcatatgctgtttatcgtgctcacaaggcggtatgacgtttttagcaatgtaattatattaaaaagatcttcagtcactatgagtggttgattgccccatagagagctataagccgacgtgaaagctgctggttccagcttggctcatgtcgtcaccagtcactagtcacttggtcgcattcattgctactcatctgcgagtgagcatatttgagatctgacttgccaagggattagaatcacgtaagactcttgatccttagaagatatttctgacaaagaaccacctaagccatgcaagttttttttttcatttggtggcgaaacaaaggtgatgaaagtttcttcttgtacaaacgccaatcccgataggtgagacaattcttgaagtaatggacctctgagtaagcatatcagtcgaatgaagttccaatatgcgttggccaaggaacagctaggcagcaactcgcgcagtggcgtcaaaaaactaataagtaaacaccactggcttccggaatactatttctctgatctctcattttctgttgtacagcagtgggacagtagagccattgaaaaaactacaatcatatcttgtatgcggcccgcaaaccaagagatttatcctttgagacattgtgagaccctccgttcgcaaccgtgctctctgttttcatcactatatgcacgctctttccaaagctcctgcactttgcacgtggcggagccatcgcccggcttccatatgtacggctgccacacctaactatttcggttgcggccatatctaccagaaagcaccgtttcccgtccgatcaactgtagttaagctggtaagagcctgaccgagtagtgtagtgggtgaccatacgcgaaactcaggtgctgcagttgttttttttttcgcgcacgaatacatcacgcagcctcgccttgacactgctcaagggataaggggaaggagctgagatagaactgagttggagcgttgcagcggcacgagcagtgaaaagagcgaagagaagagaagcagataaaagaccaaagtagcgatgatacttcgatgtttggagcgatttttcctatgtgaatattagaaatcatatgttttgtatcagctgaacagtgaatgatgtgctcaatactcaaattcatctttttgtttgctaaaaatagcttaactggcacatcatgaaaaggatgtagaaattatagagtatatttactactaagaactatataaaaacacagtgtgatgaaaagtcactgatcaggctttaaccaccgtagacgccagaaaaaacagacctaatctgatccatgccgtagccggagtacaaacataattgtagcaaaatacgcgatttttgagggtttaggtagccagatccaatggcgtactctggggcatcatctggaggaactgtaccatctgctgttcttctgctgtgaacaattggtataccatactcttcataaagttgttcgtttacaatactacccgtagcagtccaggaaccagctccagaacccgccaacacgataccttttgcgcccaggtccttgacggcctttactattagctcaggattcaagccttgataggagtacagaataatgacttctggaatttccgaagggtctgtgaggttggaaatgtcaaaaaattgccatccatttggcttgactggtgggtagtaaaactccacgtcatcatttgaaaagtaacctaaatatccctgttcatccgctctgaatgtatctaaagagttggcattcattttcgttgtccaaaacccagaggcaatacgatcgtttagagtgatcatcgtgccacgacccagtgatttctcagaagcagcaatagacactgcttgatataaattcattgggccatcagcagacgtggcagtggctggacgcatagcgcctgcgatacatactggcttctctgaatttatggtcaaatctaagaagaaagctgtctcctccatagtgtcggtcccatgagtgacaaccgcaccagcgtagtcatcagaggctagtgcctcggagataccgtgatacaatgggatcagatgcgtatagtttaaagaatttgaaccaacgttagacacttgaagatagtccagatttgccttctcagctaaagatgggacggcttctattaaatcatttacggttaatcccacgctataacccgccgttgttgcacttgtcgaacccttggaagcgatagtaccgccggtaccaaaaattttgattgatggcaaagaagaattcttctcttcacgaatttttagtagtggagcaccactggacattgcgacaaagagagaaagtaaaagggtatttaaagatctcatagttggaggttggtgagtaccagattgcttacaaaagaatagcgagccaacatttgctctgcctcaggcctcttggtgctgcttgaagactcatcttatatggcttttgtatgtcatgatttgttcttgtacattatgtgttgatattaaacaaattgatttttttttttttgcgatagcaagcagataatgaaagagacaaggacttggaacatccgataagactgcgccgatatcgatcttacagtccttcccttgtgtcatgactttcggaaaagcatcctcgtcgactggtagtttgctgtctgtcacgtgctgaagggtctgatacatttttttaaagataagagacggggtttaccttcggaggactaagcgagatctccaagtaaagatctcgcttatcaagaaagcagccaagtgtggaacgtccttttttttggtttcaaaaagatattcaacagtttacactgcagctttaattgcctcaaaaggatatcatgaggtgatctagggtcagaagggaaagattacagcatcttgagttgaatcacatctgcaaaaggtggtattattgacgttgctcttccttaatggaaactcatggggtttggaaaggaggtgcggtaatctatttttttcgaacacaaaacctaaccttgaaaagaaactgtccaatttcattgaacttacctcagaacgggccggagtctttgctttcagtctaacatggtctaatttcttcgaaaagcttcatttaattgttagactgtggttttacaaggaaaaaaccagtgctatactgaagcgatacccagaactaattaccttgtgtgacgattcggctcagcgaaacggacatggtaaaattgggaatttgaaagcaggcagcagccttgtacagcgacatgacgataggtttagaatccccatcacgtacgagttgaagaattctacgaaggctctatgcgttattcctctatcggtataaagtgtagcgttgtaggggggatattggtggtttagttgaatttgcgcaacgaaattatagaactcataaaagttcaattcaatacttgaaacccttaacgttggttcgaccatcaattgtttggacataatagttttattctgcggccgatttcaaaatttagtaaatcaaatgttgaagcatcaccagtaggatgaccactcccatgacaaaactccgtcccaaagatagcttgatcatcctaagcgggtcgcattttactatccccagttccgaagaataacaaggctcaatgcatatgctgtttatcgtgctcacaaggcggtatgacgtttttagcaatgtaattatattaaaaagatcttcagtcactatgagtggttgattgccccatagagagctataagccgacgtgaaagctgctggttccagcttggctcatgtcgtcaccagtcactagtcacttggtcgcattcattgctactcatctgcgagtgagcatatttgagatctgacttgccaagggattagaatcacgtaagactcttgatccttagaagatatttctgacaaagaaccacctaagccatgcaagttttttttttcatttggtggcgaaacaaaggtgatgaaagtttcttcttgtacaaacgccaagcccgataggtgagacaattcttgaagtaatggacctctgagtaagcatatcagtcgaatgaagttccaatatgcgttggccaaggaacagctaggcagcaactcgcgcagtggcgtcaaaaaactaataagtaaacaccactggcttccggaatactatttctctgatctctcattttctgttgtacagcagtgggacagtagagccattgaaaaaactacaatcatatcttgtatgcggcccgcaaaccaagagatttatcctttgtgagaaatgggtgaatgttgagataattgttgggattccattgttgataaaggctataatattaggtatacagaatatactagaagttctcctcgaggatataggaatcctcaaaatggaatctatatttctacatactaatattacgattattcctcattccgttttatatgtttatattcattgatcctattacattatcaatccttgcgtttcagcttccactaatttagatgactatttctcatcatttgcgtcatcttctaacaccgtatatgataatatactagtaatgtaaatactagttagtagatgatagttgatttctattccaacataccacccataatgtaatagatctaatgaatccatttgttagttaatagtttaaatgtttttatcggaagaggttttgtcatcacatcagcaatgttcttcttggtctcgatgtagtatacgtataaattattacctgatacttcatctctaagtctcattgcctttgtgccaaaaaatctgtttctaaatttctcttcatttgtagacttaattatactgatcgttgatctactatcagtaagtaagcctttaataattggtttcttgttaagttcttgtatcaggtaacttagattatttaataatgggacagattcacttatcgcgtgtatttctgcttccgtagttgaagtacatgttaatgaagccttggtggactttcctccaattacctttccattaagtaaatatatgttgccaatttgtgatttataatacggttggttgccatacgaagcatcacttattgcgactagtttattatctggctcggtaggtttgtttttgtgccatatcagttgtttatctctagtgtcccacatgaattgtatcaactcatatgtcatgtctaaaacttgcctagaggggaatagtatatgttgagcaagtgtgttgatgtagtatagtaagtcaaatctaaatttatatccaacatatgaagctagaccaatcaacttttgcatttcatgtaccttctctttgtattcatcttcatctatttctagttcatcctggtctatataaagacctggttgacctggagcgctaagttttcttccttttggattcaaaggtacgtttaatttgggtattttctcagttaatgagttttccatacctaatttcatgtatttacctctttgatatttgatttctaagccaagtatgtcgtactgaatttcgttatcactttcacccagatttattatctttgtatcgtattgtttcttgagtgttgttatgattttcttatttgcatttaagtctttgctgaataaaatcatgtcgtcaacaaataaacatattgttacttgactattcttaaatacgcatgaccatccacgaacttcttccataccacactgttttatcaggtatgatttgatagtttcgtaccagttcgctccactttgtttcaatccataaagtgatttcttcaaacgtatcaacttatcattcattcctaaatgtggtggaggtcttatgtataattcttctttgatgtctgcatacaaatatgccgaagatatgtctaattgtgtaatatagtagttattgtctaatgcaagtgacagggatgtcattaatgcatagtgatgtacggtattggattgcatgcctgagtcgtaagtgtcaggatgctgaatatcacctcttgcaacaaatctagctttatgagtaccgtcacgtttcttgttgaagataaacattgagtttattactcttttagggtctatttcttttctgtcataatattcgtcagtgtcccaagttttcatcttcaacagttgattgacttctttgtggtatgcctcgatatatttttctttttctttaatatctttattataggtgattgcctcatcgtatcgtaaggttgtccgtattggtttgattgattttactgcttttacagctgcaatcaggtgaattcgtttcttcgatctcggaggttctaaactacgcatattcttagtattccatgtgtctcgtgataccttaatttcagtttcattatcttctaatgatcttttcttactgttgatagtagtataggcattagagtcaccaataccacccaaactggaattagtttgacgagaatttatcggtgggagttctttaaatgggtcagggaattcggtaggagattctggaggtagatcagggagtgggagatcagcgatgatagattcctcggtattctgttcagaaacagtagttggcgttttgataggaacaatattgtgcgatgaattattttccggtggagaagcatcgattgaaggtgaacggtgtataatccttttctcagtctcttggtcacttatctgcggaacagttttgttgttggtaccacccgtactggatattggtacgtttgtatgattagtctcattttcactgtacgagtctgagtgtctgaaatctttagatttactggcgtgcgacgactcatgtgtgttagattgggacatgggagcaagtaaaggaacatttaatttatgcataccacccgaaccggtactctcgatattggaaatttggggggtgctagatctcttctttgatggaagaatattagattcagatatgttggggtcaacttctctgggtgcgcgaatattggttttagaaacacgtttcgaatcttcagtatgagttgacggaggtgtggaatcggttggactcacagcttttgaaaggacatttctcggttgctcaggatgtagttcaatgtcggattggaagtcatggtcagattctatgttaagatcattggattcttggatctcatttgacgcaatgaacgaatgatatgaagcagttaaacggtttaagtcttcatcgaaagtgagtgcgtcgtaattgaattgatctaatctggattccttgccctgaagaataacatagttagttgtatctactgtcttctttaaggatggaagatagatgatatatccataagagtttcgagacggatgtagagcgtagcctgggatgccacgaggatgtattttggagttagggttgtgatcattgacgataacaggttgaccgaaaggtaacaaagtactgatatcaagtcctgccaagccagcatgttgtcttgcagattttttgcttttaggtgaagctagtgaatttctcacaatagtagaaaattcgattgcagagaaccataaatggttcggtaaaccactacattgcagttgagtacggcagtcatctaataaggtacggttgagccgttcagcgactccatgtgctcgggaatccgctgtggttgtatagcatggagttataccatttttttcaaggaatttatggagagttctgttagtatactcagaaccacggtccatttgtataaccaagacactggcctgaaactggttcttaataaaagctagtatcgtagtaaaaacatcgaggatagagtcctcgcgacggtcgtgtaatggataaacccaacggaattttgttgtctcatcagtaaatgagatgaaataggatggtgcactatttggtaggttgtgaactggaccaaatatgtcagtatgtaggtattgaaagggttcgtatgaattttggtattttagtcgtgaacctttgatatgtctgtgtttggtgcttttgccgattaaacaatcaggacattgatagtcaatagcactagaccagtcgacatctgattcgttaaaatacgtgatggtgttatttttaagtgagtatcgaattgtcggtgcattggcatgcgcaagcattcgatgaatgaaaggataaggatatttgcgtgtactttcacttgtatggacattattgatggtgggtacggagatatttgatggaagcaagtactttttagatacccagtaaaagtctccatattttacgataggtgcaagtacagtgccgtcagatcgttctaagacgtttttggtaaagcatgctgtgatatctactgcagccaattcattcaaactgagtaagtcataggctatgttaggagtgtgcaatacctttattgatgttttggtgttgtcctggaagtgaaattgtaggtcaccaatagcgttaattggtatatttcttttttgagcatcaactacgtttatgtcaggattagatgatgctgagtgtatgtgatgagcagatcttataagggttcgtgatgctcctgaatcgagaaggaggtgtccagggagttcatcatcagaatgattagtgtgatttaccgtagattcagtaagttcctggcctaaggtgaaggtcgtgcttattgttcaattgaatcggttcagtagttgatttactgatggaatcgttgtccgtgctgggagagttattagatgtggatacattgtgagccctggctgttttcgatttcgaattatttgttttttgaggattccgagctataactttgggtttggttgtattcgtatagctgcgagaatcattcttctcatcactcagatttctcctgtaattaggtttgctgtttctcgatccctgttgttcttcataaatagcatggatatctaagaacagttcagcgactgtcatatttagatgtcgatgacgtgtgtagcgtaaaaatttatattcgccagatagacctctcataattaattggcatgcgaccttgttattgatatgaatgccattattgttcagtctgtcgataatgtttgtgacttttgtttcaaatgcatctgcaggtgtactgccattatattgcaaatttgccagggtcacaatgtcgtttgcctcttgggtatcagattgcattttttcaatacttttggaaagaattttcatgatatccgtataatcaacggataggatgtctttgacccaggtaggtaggaattgagagggagcaaatatttgaaaagtgttatacaagaaggtgagttcatcatcagtgatctgacgtacgggttttccgtttactgtcggaataataccaccgagattcgagttttgtaaaaatttgatgtatgttttaacccaatttggaaagtcattaggtgaggttaacattggtggtggtctgacatattttttagtggatgtcatatcagagtccgctgaggatgaatcagtaaatgtattacctgactcaggtgatggagtgctcagaggcgttccaactgatgatggatactgcggaaactgtgattgtggcccaggtggaaagtacataggcgacatttgataaggtgtatacggaatcatagatgggtgtccgtaaaatgaccaaccagatggattggcttggttttgggtcatcatgcactgctgtgggtacggcccattctgtggaggtggtactgaagcaggttgaggagaggcatgatgggggttctctggaacagctgatgaagcaggtgttgttgtctgttgagagttagccttagtggaagccttctcacattcttctgttttggaagctgaaacgtctaacggatcttgatttgtgtggacttccttagaagtaaccgaagcacaggcgctaccatgagaaatgggtgaatgttgagataattgttgggattccattgttgataaaggctataatattaggtatacagaatatactagaagttctcctcgaggatataggaatcctcaaaatggaatctatatttctacatactaatattacgattattcctcattccgttttatatgtttatattcattgatcctattacattatcaatccttgcgtttcagcttccactaatttagatgactatttctcatcatttgcgtcatcttctaacaccgtatatgataatatactagtaatgtaaatactagttagtagatgatagttgatttctattccaacactttgagacattgtgagaccctccgttcgcaaccgtgctctctgttttcatcactatatgcacgctctttccaaagctcctgcactttgcacgtggcggagccatcgcccggcttccatatgtacggctgccacacctaactatttcggttgcggccatatctaccagaaagcaccgtttcccgtccgatcaactgtagttaagctggtaagagcctgaccgagtagtgtagtgggtgaccatacgcgaaactcaggtgctgcagttgttttttttttcgcgcacgaatacatcacgcagcctcgccttgacactgctcaagggataaggggaaggagctgagatagaactgagttggagcgttgcagcggcacgagcagtgaaaagagcgaagagaagagaagcagataaaagaccaaagtagcgatgatacttcgatgtttggagcgatttttcctatgtgaatattagaaatcatatgttttgtatcagctgaacagtgaatgatgtgctcaatactcaaattcatctttttgtttgctaaaaatagcttaactggcacatcatgaaaaggatgtagaaattatagagtatatttactactaagaactatataaaaacacagtgtgatgaaaagtcactgatcaggctttaaccaccgtagacgccagaaaaaacagacctaatctgatccatgccgtagccggagtacaaacataattgtagcaaaatacgcgatttttgagggtttaggtagccagatccaatggcgtactctggggcatcatctggaggaactgtaccatctgctgttcttctgctgtgaacaattggtataccatactcttcataaagttgttcgtttacaatactacccgtagcagtccaggaaccagctccagaacccgccaacacgataccttttgcgcccaggtccttgacggcctttactattagctcaggattcaagccttgataggagtacagaataatgacttctggaatttccgaagggtctgtgaggttggaaatgtcaaaaaattgccatccatttggcttgactggtgggtagtaaaactccacgtcatcatttgaaaagtaacctaaatatccctgttcatccgctctgaatgtatctaaagagttggcattcattttcgttgtccaaaacccagaggcaatacgatcgtttagagtgatcatcgtgccacgacccagtgatttctcagaagcagcaatagacactgcttgatataaattcattgggccatcagcagacgtggcagtggctggacgcatagcgcctgcgatacatactggcttctctgaatttatggtcaaatctaagaagaaagctgtctcctccatagtgtcggtcccatgagtgacaaccgcaccagcgtagtcatcagaggctagtgcctcggagataccgtgatacaatgggatcagatgcgtatagtttaaagaatttgaaccaacgttagacacttgaagatagtccagatttgccttctcagctaaagatgggacggcttctattaaatcatttacggttaatcccacgctataacccgccgttgttgcacttgtcgaacccttggaagcgatagtaccgccggtaccaaaaattttgattgatggcaaagaagaattcttctcttcacgaatttttagtagtggagcaccactggacattgcgacaaagagagaaagtaaaagggtatttaaagatctcatagttggaggttggtgagtaccagattgcttacaaaagaatagcgagccaacatttgctctgcctcaggcctcttggtgctgcttgaagactcatcttatatggcttttgtatgtcatgatttgttcttgtacattatgtgttgatattaaacaaattgatttttttttttttgcgatagcaagcagataatgaaagagacaaggacttggaacatccgataagactgcgccgatatcgatcttacagtccttcccttgtgtcatgactttcggaaaagcatcctcgtcgactggtagtttgctgtctgtcacgtgctgaagggtctgatacatttttttaaagataagagacggggtttacccttcggaggactaagcgagatctccaagtaaagatctcgcttatcaagaaagcagccaagtgtggaacgtccttttttttggtttcaaaaagatattcaacagtttacactgcagctttaattgcctcaaaaggatatcatgaggtgatctagggtcagaagggaaagattacagcatcttgagttgaatcacatctgcaaaaggtggtattattgacgttgctcttccttaatggaaactcatggggtttggaaaggaggtgcggtaatctatttttttcgaacacaaaacctaaccttgaaaagaaactgtccaatttcattgaacttacctcagaacgggccggagtctttgctttcagtctaacatggtctaatttcttcgaaaagcttcatttaattgttagactgtggttttacaaggaaaaaaccagtgctatactgaagcgatacccagaactaattaccttgtgtgacgattcggctcagcgaaacggacatggtaaaattgggaatttgaaagcaggcagcagccttgtacagcgacatgacgataggtttagaatccccatcacgtacgagttgaagaattctacgaaggctctatgcgttattcctctatcggtataaagtgtagcgttgtaggggggatattggtggtttagttgaatttgcgcaacgaaattatagaactcataaaagttcaattcaatacttgaaacccttaacgttggttcgaccatcaattgtttggacataatagttttattctgcggccgatttcaaaatttagtaaatcaaatgttgaagcatcaccagtaggatgaccactcccatgacaaaactccgtcccaaagatagcttgatcatcctaagcgggtcgcattttactatccccagttccgaagaataacaaggctcaatgcatatgctgtttatcgtgctcacaaggcggtatgacgtttttagcaatgtaattatattaaaaagatcttcagtcactatgagtggttgattgccccatagagagctataagccgacgtgaaagctgctggttccagcttggctcatgtcgtcaccagtcactagtcacttggtcgcattcattgctactcatctgcgagtgagcatatttgagatctgacttgccaagggattagaatcacgtaagactcttgatccttagaagatatttctgacaaagaaccacctaagccatgcaagttttttttttcatttggtggcgaaacaaaggtgatgaaagtttcttcttgtacaaacgccaagcccgataggtgagacaattcttgaagtaatggacctctgagtaagcatatcagtcgaatgaagttccaatatgcgttggccaaggaacagctaggcagcaactcgcgcagtggcgtcaaaaaactaataagtaaacaccactggcttccggaatactatttctctgatctctcattttctgttgtacagcagtgggacagtagagccattgaaaaaactacaatcatatcttgtatgcggcccgcaaaccaagagatttatcctttgagacattgtgagaccctccgttcgcaaccgtgctctctgttttcatcactatatgcacgctctttccaaagctcctgcactttgcacgtggcggagccatcgcccggcttccatatgtacggctgccacacctaactatttcggttgcggccatatctaccagaaagcaccgtttcccgtccgatcaactgtagttaagctggtaagagcctgaccgagtagtgtagtgggtgaccatacgcgaaactcaggtgctgcagttgttttttttttcgcgcacgaatacatcacgcagcctcgccttgacactgctcaagggataaggggaaggagctgagatagaactgagttggagcgttgcagcggcacgagcagtgaaaagagcgaagagaagagaagcagataaaagaccaaagtagcgatgatacttcgatgtttggagcgatttttcctatgtgaatattagaaatcatatgttttgtatcagctgaacagtgaatgatgtgctcaatactcaaattcatctttttgtttgctaaaaatagcttaactggcacatcatgaaaaggatgtagaaattatagagtatatttactactaagaactatataaaaacacagtgtgatgaaaagtcactgatcaggctttaaccaccgtagacgccagaaaaaacagacctaatctgatccatgccgtagccggagtacaaacataattgtagcaaaatacgcgatttttgagggtttaggtagccagatccaatggcgtactctggggcatcatctggaggaactgtaccatctgctgttcttctgctgtgaacaattggtataccatactcttcataaagttgttcgtttacaatactacccgtagcagtccaggaaccagctccagaacccgccaacacgataccttttgcgcccaggtccttgacggcctttactattagctcaggattcaagccttgataggagtacagaataatgacttctggaatttccgaagggtctgtgaggttggaaatgtcaaaaaattgccatccatttggcttgactggtgggtagtaaaactccacgtcatcatttgaaaagtaacctaaatatccctgttcatccgctctgaatgtatctaaagagttggcattcattttcgttgtccaaaacccagaggcaatacgatcgtttagagtgatcatcgtgccacgacccagtgatttctcagaagcagcaatagacactgcttgatataaattcattgggccatcagcagacgtggcagtggctggacgcatagcgcctgcgatacatactggcttctctgaatttatggtcaaatctaagaagaaagctgtctcctccatagtgtcggtcccatgagtgacaaccgcaccagcgtagtcatcagaggctagtgcctcggagataccgtgatacaatgggatcagatgcgtatagtttaaagaatttgaaccaacgttagacacttgaagatagtccagatttgccttctcagctaaagatgggacggcttctattaaatcatttacggttaatcccacgctataacccgccgttgttgcacttgtcgaacccttggaagcgatagtaccgccggtaccaaaaattttgattgatggcaaagaagaattcttctcttcacgaatttttagtagtggagcaccactggacattgcgacaaagagagaaagtaaaagggtatttaaagatctcatagttggaggttggtgagtaccagattgcttacaaaagaatagcgagccaacatttgctctgcctcaggcctcttggtgctgcttgaagactcatcttatatggcttttgtatgtcatgatttgttcttgtacattatgtgttgatattaaacaaattgatttttttttttttgcgatagcaagcagataatgaaagagacaaggacttggaacatccgataagactgcgccgatatcgatcttacagtccttcccttgtgtcatgactttcggaaaagcatcctcgtcgactggtagtttgctgtctgtcacgtgctgaagggtctgatacatttttttaaagataagagacggggtttacccttcggaggactaagcgagatctccaagtaaagatctcgcttatcaagaaagcagccaagtgtggaacgtccttttttttggtttcaaaaagatattcaacagtttacactgcagctttaattgcctcaaaaggatatcatgaggtgatctagggtcagaagggaaagattacagcatcttgagttgaatcacatctgcaaaaggtggtattattgacgttgctcttccttaatggaaactcatggggtttggaaaggaggtgcggtaatctatttttttcgaacacaaaacctaaccttgaaaagaaactgtccaatttcattgaacttacctcagaacgggccggagtctttgctttcagtctaacatggtctaatttcttcgaaaagcttcatttaattgttagactgtggttttacaaggaaaaaaccagtgctatactgaagcgatacccagaactaattaccttgtgtgacgattcggctcagcgaaacggacatggtaaaattgggaatttgaaagcaggcagcagccttgtacagcgacatgacgataggtttagaatccccatcacgtacgagttgaagaattctacgaaggctctatgcgttattcctctatcggtataaagtgtagcgttgtaggggggatattggtggtttagttgaatttgcgcaacgaaattatagaactcataaaagttcaattcaatacttgaaacccttaacgttggttcgaccatcaattgtttggacataatagttttattctgcggccgatttcaaaatttagtaaatcaaatgttgaagcatcaccagtaggatgaccactcccatgacaaaactccgtcccaaagatagcttgatcatcctaagcgggtcgcattttactatccccagttccgaagaataacaaggctcaatgcatatgctgtttatcgtgctcacaaggcggtatgacgtttttagcaatgtaattatattaaaaagatcttcagtcactatgagtggttgattgccccatagagagctataagccgacgtgaaagctgctggttccagcttggctcatgtcgtcaccagtcactagtcacttggtcgcattcattgctactcatctgcgagtgagcatatttgagatctgacttgccaagggattagaatcacgtaagactcttgatccttagaagatatttctgacaaagaaccacctaagccatgcaagttttttttttcatttggtggcgaaacaaaggtgatgaaagtttcttcttgtacaaacgccaagcccgataggtgagacaattcttgaagtaatggacctctgagtaagcatatcagtcgaatgaagttccaatatgcgttggccaaggaacagctaggcagcaactcgcgcagtggcgtcaaaaaactaataagtaaacaccactggcttccggaatactatttctctgatctctcattttctgttgtacagcagtgggacagtagagccattgaaaaaactacaatcatatcttgtatgcggcccgcaaaccaagagatttatcctttgagacattgtgagaccctccgttcgcaaccgtgctctctgttttcatcactatatgcacgctctttccaaagctcctgcactttgcacgtggcggagccatcgcccggcttccatatgtacggctgccacacctaactatttcggttgcggccatatctaccagaaagcaccgtttcccgtccgatcaactgtagttaagctggtaagagcctgaccgagtagtgtagtgggtgaccatacgcgaaactcaggtgctgcaatcttttttttttttccgcgcgcaagcacgttacccggaccccgtcttagcacacgcacacgcacacgcagcgctcacagaccagcgaaacagacctgagagccacgatgcagcacacgcttacccggaccgcctctctgccagaacgctcgagcagcgcccacagcgccgctactgcgttacccgcacttcgccgcccgccagacagctgcgagactctcgtcccgctactgtgtatcttttggttcgtcttcgttagtatgagcccgctcccgccggctcgtgccaacaaatcagacaacaaaggcttaatctcagcagatcgtaacaacaaggctactctactgcttacaataccccgttgtacatccaagtcgtatacaaatgatttatccccactcaaaatgacattgctatccgccggcaagcacccaaggcctttccgccaagagcaccgttgctagcctgctatggttcagcgacgccacaaggacgccttattcgtatccatctatattgtgtggagcaaagaaatcaccgcgttctagcatggattctgacttagaggcgttcagccataatccagcggatggtagcttcgcggcaatgcctgatcagacagccgcaaaaaccaattatccgaatgaactgttcctctcgtactaagttcaattactattgcggtaacattcatcagtagggtaaaactaacctgtctcacgacggtctaaacccagctcacgttccctattagtgggtgaacaatccaacgcttaccgaattctgcttcggtatgataggaagagccgacatcgaagaatcaaaaagcaatgtcgctatgaacgcttgactgccacaagccagttatccctgtggtaacttttctggcacctctagcctcaaattccgagggactaaaggatcgataggccacactttcatggtttgtattcacactgaaaatcaaaatcaaggggacttttacccttttgttctactggagatttctgttctccatgagtcccccttaggacatctgcgttatcgtttaacagatgtgccgccccagccaaactctcctggcgaaatttattgtttttacataaactgtattatgaacagaaggtagtagtgcattagaggtattacatatcacgtgatgtttatttctttttacctatatatggattgaatattagagttaccctacgttcaatttctagattctatggtgttacccctgatgagttctgcatctgtcctatctacctattttaccgttttggacgaatattaaagggcgggtaacacaaatactgtctgcgtaatcaatctttttaggactaattaagggtagttccatagttattagaatcgtatttctcgaattgaatttccttccctatgataaacttctacactggaaggtcatcattattttttgttaagtactttacgaatgagaaggtagtttatcagcttatatttcaggtccgttgactttttctggctacagttgttttcaactggtgctgctgcaggatataggaagtcgaagatttatttttttgcacagcttaatgttcctggcgaaaaagcagcgaaatcgagaggtatttactgctcagagatatgaagaggtaggtacatattcattggcagatattctacaatgcaattattatgacccaatcacacagtattgtgctgacctccattgagcgatgactaaaaaaacttttagtagcacgtttattattgctttcccttgctgctataagggaaaattcagtaaataataccgaagatataatggtgtttatcagatcagtgtgatgtgttcagctaaatggaaagctacagatgctatctgatcgagatattgcaagaaaaggtctcacagtatttttttcacgtgcttttttttcaaggcaatgaccaatatgaaacgatcgatgagcatagtaaacagtattatctggataattctgtatgcaatggtaacggataacttaaaatctttatgttaagtatatacaattgcatcacttttttttttttggcttgtggcttatattaacaaatttattgtgcattttttgcaatctgaagggctgctttaatattgaatacgggaagggccctttcacaccccactataagtgcagttttaggaagaaagtattaatgtatccttcaaaaaagaaaatacacgtgctgttaatataccgacatcgtgttttggggaatgggtactagagccgccgatatctattcatattttttatgtagcaacatctcatttgaacaagaatttattgacatagaactttatacaagtatgaagagaaattagaaattagcagagatgtgaaatgaacttactaataaatcggcgtggtcattggttcagtttttcttcgatataggatacattagggacagtggatgtatttcctagggcaaccattgaaactggtttgttttgtaatctgtaatttgcccacataataatatcatccttagtgattttatcaacctgctcgaaaacttcttctggtgataatcttttacctgtggtcaccacttgtctgcctatatcttctacaatggctgtcgatccatccaacgatagcaacagagctgcctttagctgagcttttgccctattcacctctgcatccgatattttgccagattttattctcttccactctttcaggatctcattaacaattaactgcacgttatgctcattagaatcagttactatgtacattccccacagacctgaatcagcgtaagaggtggaaaatgacatataagaattagccaaagaaccattttgacttgctgcaacagctaatggagagggggagtttgtacctgtgccaatggctctgtcccagttaccaacaatcgcttgtgttgccagagctacaaaataatcaggtgcagaccatgacacgccttctaatgcgatagcaatatgtgttgtaggtaacgtgttttctttgataaacctttcacctctacaaaaaactggtaatgggccccttggtgatcccaacgggacaggcgattcagatttgggcacatggccaaagtatttttgagcatactgtaccaatttttcatgatcaacagcgcccgcacctgccaataccattctgtcgcctttatagttcttggttatatagtctttcaaatcagttcttgttattgattttatgttttttataggacccagaatggttcttcctaaaggttggtccttatacgtaatctcatgaagatggtcaaaaacaacttcatcatacatcttgtccacctcttcactttctctgatgatgacatccctttctctctcaatagcactattatctaaaactgacttagtcaaaatatcacttagaatatcaacagcctttgggatatcttcttgtagggacttagcataataaactgtgttttctcttgatgtatatgcattcaaatgagatccgatattttcaatttccaattcaattccttgttgtgacctattctgagtacccttgaaagccaagtgttctagaaaatgcgctgtaccattgttttttacgttttctgccctagaaccagcatcgacaaatattccaacagtagccgaagatgtgttggggatgtactctgtggcaattgtcaacccattaggaagtttagaggttctggttcctggaatttgtgaggaaattgtacttaaaagcctccgtgtattacggaacttggatgctgttcttgaaaacattgtatgatcacctatcactttgcgcactagtttgatgcctgagagcaagatatcatgatttatccatagcgttcaaattcacttcttattactaaagagatgagtccagctcgattacgaatatcactaaatacgtgaaaataatattggtcatctaatctgtgcactgaacagtagtatcacccattgttggctgagaaattaagctcagcattttagctttcctcactacgtgttgaggaatttaatacgtaaatatagtcttagtaaagccgtgcattttacttcttaactcctttggacgggatcaagtttaaggagaataaaaccctgattcgcaccttcaacgcggctctaacatggtactatcagactctcacatccagattggagtacccttatccgaagtaacgattttttattacggtttaagataataagggacgcgtatgataactaaaaatcgtcagttgaagggcgctggccataggtatcccttaattttgacgtcgaatttcatagaagcaaacctatatattttcagtccccagtggacagaccgtttatcagttctaatgaatcagcaacgattctcaaaaaggttgccccaattcttaggaaagtaggaatgtcatcgactaagtttttgaaaccactctgcagaataagggcttttcatacttcaattgccagatcctttaccattccttttctgccaaagattccacagaaacctggaggtgtgagtgggaccgcaaatgattcctcttatatgccgcccgaaagcagagctcagggttcgtaccattggattgtcgagcgcggactgtccttagcggttcttccgctgatcgcagttcccttggtcactacaggccctatttccacttttaccgacacatttctttccttggtcctgctaggtcattgtcatatcggatttcagtcttgcattatagactatatttctgaaagagtctatggaaaggtacatcattacgcgatgtatttattgagcttgggctcctttttatcgttcgtcggtatatataaattagagagtcaagaagctggtcttattgcctctttaaaatcattatgggataacaaacctgtggaaaaaaagaggcagtaatcatcaattaatcaatatggtttggttagtggtgactaccttttttattctcgttatatatgtgtattagaaataatttaataaccgattatttattgcttattttactggtcccagttttccaacaggacttcttttatgggcaaagtgaactcaccctcttcattgacgtattttcttgaccaaagttggccagtattattgtgttccataggtatcaagtgcgttttagtttgcaggccaattttcgttattatgcacgctgaatgcaacgctatttggtcattgaacaactctggaaaattgacagtgctgccatgtctcttgtcgtttaatatgggctgatttaaaatttgagagacgtgatttcgaatctgatgtttttttcctgtaaccaattgtaaaacaatacaattttcgtcaacttctttgaacttagtaatctccctaccaccatgtgaaatcaagaaattatatttaggaccatatttaatttcatagttatttggtttgttgaaacgaccggacgactcgacaatagctacatactttctttgcaacttataaccgttgttgccgcccttttgtaaaaatctagagaattttacacttccgtctttagtctttgcaatcagcatcccccccgtaacacaatggtctaacctatgtacagtacgacataattctacttctctatgtgaataataaatagccttgaatctttctagtagtggagtagggtcaagattaggatgtgtcctgccccatgttctgcagtctggtggttgagaaggtatgccaggtggtttattaactatgaagtaatgcgtgttttcaaagattattggtatctgctttttcagagacattaaaatatatcctaactgatcctgatcttatagccattcatacattgttccttttttttttcctcttaagtaacttcgtgggcctaagaaaaaggtaatatgcaaatgataaaaatgcaacagttctcaaaaaaggcattctgccaaaaaacgtgaatactctatgtacgctatctaaaattcaatttaacgctattaatgaaattgtcatgattgaagtcctctctgttggaaatgtagctttgaataatatcccttccaatgtctgctaaatgaccctccttagttagtgattctaataattcaggttgaacagtaaatagatttgcaagttctctcaaagtagcaaatttgtcaatcaaggacgctactccccaatcttctattgcagtttggtagcctatgatatccttcgtaactacaacaccgccaatggaattgacttgaaagtgtgaataatgtgacagtagtaaaccgtataactcttccccaatcaacgttaaaaatgtctgtaagttttttcctttaagaaacttggaagactgttcaaagattaagtttaaaatattgacaatctcaatagccggtaaggtgtcttgatccaatagctcttgagattttggcacaaaatccttcttcttttgcttgcacaaaattgcggaaaatttagtcgaaattaccgtaatggtctcttgcaaaattatattaataagtatttccatcttttgaatttgtgaatttgtcatctcaataatctgagctttaatttctggcgaattatttaataatggtaagaaaatggatttgattgaaattgacaataaatctaatatctccgtgctcattgaaataaatttcaagaaatttaagtttaccactcctgctgttttattaatatcaactttacaaattttccagtaagcgacttctaacgcaatttccatgtacgaatcaacaattcccaaaaacattatttttaatatttctaggatgtatagatgtgctttgtttggaattagttccattactcttgcagtagactccaccacacattttaacatagaatcaacatcgttcaaagaatagttcgccggactgtttggactgttatcaatatcgcttgctgtaaaactagaatttaccaaacttgaagagttgtttgctacatcatactgcgtagaagaagagctgttgttaaacgaatcgctcaaagtatttgtacggtttagactcaaatgatctttatctaaatgagttttcaaaaaggaattaaattgtgacaatttactccttgatgttgaatcttgacgagagtgtgtattccctctaggagaatgcatgaatgcatccacattagttgatagtttctccttatacttatctaataaaaccctcttgttgatttctttatcatagtttacagtaaacttggatgtcatatccactagaatcgcttccaaggatcttttctcaataccgaaatatttggacctatcatatagataatgcgaaaacaaatcagcaaaacattgttctagggttgttgataagatttggttactgtcgtcaatttctaatagttgaaagtaatcaattaaacttttagtgaacttaccaaataaagtgaacagtccgtgtaatattctcacataagccaaatttgagattgacagggaattcctcaataaaacctcaaatcttggttcaattttttgagcaaaaactctttgaataaacaattgtatcacatgagttgccttttcttcaaatacccttttaacaatcttggattcattttttattacagtttccacatcatttatcaaattttgcatggatgtctcgatgataacactgtggttctcaaaatcaatcagctgttccttaaacttcacgttttttatgaaaacattctcaaattcattttccaagtcaatctgcttggtgtcaatgaaataatcgtgctgattgatgaagctttgaatgacattaacaccgccattaaaattgttgagaatgatggcaatttcatttaatttagtaaaattattctctctatatgcagaattaaaattctctaacagctcattttccatcatttcagagtacttttcaataaccagctttgtgtttattgtttttggtattgaacttgtctctagtttggatgataatatcaatagattcttcattaatttcacggactttaagtttaatttccagtttttagacagccttaattgttcaacaatatctgattttcccatggaataaaagtcattgtacctgcgaatcaattccacactttgaatatagttttgctttttcttgattgcggtttctaatttatctcccaatggcgaaacaacttgagtaacatttgtcaagcgatcatctagcttgtcgaatgtaagtaaagtagtatgcaaatccttggataattttatcacattctccgaatgaataacttcctgagtagccacttgctcggaaaaatactgtcttttatttagtgtttcctcatttaagttttttagttcctttaaggtagattcaaaagttctaatgtaaggttttggatctaattgtttccaaatagcctctctgattgcatcctgatccttttcattggttggaagatttttcgtgtttgcatcaatcaacacgtcattacgatggtctttgctcaattcctgaacgaattcattgactgttaatccgcccaggaaattgtccgttttcaatagtttcttccatttcggatcgagttcatataatgagttcatgttgtaacaccacttgatgacaaagcaaatttgctcaattttctatatccctttaatgcatgaacggttctttattttgttttctgtcgacattctagtttttcggaatctcaaaataattaattacatatacgtacataagtagcccagataaacaaaaataccttaaaaaagagttactagccgtatatggatgtttgaagatacatggaaaccgtctctggtgtcgtgtatataagaaacttctagttttattcagacgcactcattatctttgctacataacatttctctctgatttgactgcgcatcttacccctcccccatgcatgtggagtcataggagtaattttaaaggtagaatttcatattaaatatcgctgcttgattattttgtagcaaatcaaaagagtgtttcaagtaagtaaaaacatttgagcctccccatttgttgaaaggagagaaattaaacttggttggggttaattatttgatgggtatattaatttgcaaccgcaaggtatcgataataaatattctacaaaacctttatcaatagtggtgaagtctttagtgcgatctacctggggttaatgaacgagaagttcttgagatatctttcctgtttacctccgtgcatcctgtaaggaattgggtttatcatttatcatttattttagtacaaacttttttttttggcccgggcgcactttttcaagcggtgggaactcatcaaaatgaaaaactagatacttttagacttattaaatggtttaaatattttgagatgttcgttatatcagaaacttccttacttctatcttttattccaatacaaagaagtcacaagattacttggtaagaaagaagcagttaatttttaattttgccgacaagccaagatgcaaattttcgtcaagactttaaccggtaagactattaccctggaagttgaatcttctgacactattgacaatgtcaagtccaagatccaagacaaggaaggtattccacctgaccaacaaagattgatctttgctggtaagcaattggaagatggtagaactttgtccgactacaacatccaaaaggaatctactctacacttggtcttgagattgagaggtggtggtaagaagagaaagaagaaggtctacaccaccccaaagaagatcaagcacaagcacaagaaggtcaagttggctgtcttgtcctactacaaggtcgatgctgaaggtaaggttaccaaattgagaagagaatgtagcaacccaacttgtggtgctggtgttttcttggctaaccacaaggacagattgtactgtggtaagtgtcattccgtctacaaggttaacgcttaagtaaagtatttttaaaacttatatattttaattgatcgttaaattttgaaaaaggcttttaatattgtcattatttacttttctatttacaacaaaagaacaaatgaatagatagacagtagaggaatataagtagtatgcagtgccatgcgggatcaaggaatttgtatctctaattttcgtggttgtatgcgtctctaaacaagtcaatattttgctgtaagatggttctgccgctcctttcagttcctttaagaagcgtacctgcagatattttaacatcctccatggtttcattgactttactgacaagttgattgctcaagtcatcaacatgtttttcccaattttcactaaatacttgcaaaacagcatcgaatcccattttaccctttttagcgttctcgcaaaacctttgaactgaccaatcttccatcttattacacagctttctaatggatccatatgctgtaatttgggcttcctgctggaaaagtgttttattagccgagtcatcgggatgcgggctatatgttacagtttcgtagacttttaatagattgcacatcgttaaattacagcttctcatggtcaagctctttttatttaagtctaccacagaaacttctctgacatgactcatattggtccctcctagcatcatcatgatccatttgggaacaccttgttttacagtaatcaaccgttcagtaactaagaccttaccttgatccttcaattctcttcttaaaacgtccactgcgatgacatgtgtagatatttcatttgggtattttttccagttagcggcggttacctggtcccatggatagttgaaatcgtaactgttttgaaacaatttcattatcgtcttttaattattctcgattattttatcttagtctgaaatctattctttcgtcctattgatgcttaaattcaaaaatatgtacatcacttcgcatgataattttatcgcctatatattctttacatttttcacattcattcctttttaccgctctgaccaatcaacgttgtgccgatgctcgcaaaagatatttttgtccgggcaacggcttttgcgacagacggtaataatagtagggccccttgcccccttctcatcttattcttctcctttcttcttcattccattgttttttagtggtcctaactcaataccctttcaagattatcgttgctctccatggtgtccatcacggtcacatggtgcagtacttccttcctactgctctctgcgatggagccatcgcacataatcatctcattcaagatatcgtagaccttactgaagttaaatataatgtctagctcacaaacattgccgaaatatgtgtccattgtttcgacaaaccgatggataatttccaaggtcagcagttcattgtcaacatcgggcgtcatcccaacaataaaatatagactagcatatcgcttgtatactactttgtggtcattatactcgatgatgttacacattttgggttttcttgctaatatcgtaggtgtcaagtctttcacaatttttgccttttcaccagcggacattgccgtgtaccatttctttaatctgatttttccttgcctagaaaccagcaacaaatattttaattgcgtcatcttgtgtacctgtgtatccgtatataatctcctccaggatcgctcttgttcttggctgaaattgttgttataacttcttgttcattcattgccatttttacacatatcgttagggcccgattcgtttgggatcgaattgttacccgactgaaaggatctattcaatatacattataaaaaagaaactacacatgagcgtgtgcattacctttactcgtcgctgtcgtcttctgtgggtgggacccatgccgcaggtttgaagtactcttggtcatttgccacatctttcccaaacttttctttgtcgtcggcaaactctagcaggtattccagctccaattcatgacattgtctgccgaggatgacaagcgaatgaagtggctctcctgaatcgtaattggctaactcacttatggtaccagacttaaagctttgggagctcgagcctaatctactaattgcgactgctggagtatcaggagtgtatgcctttgtacctcttttctcttcaatttctaataattgttcacaacattgagcgatagacatgtatcttggtggttcgtagattagtctgccacgggccatattttcaatgctttgttccttaactttgatgtccaataacactaaagtatgaaggccaatttttctattttcccagatcttgtcgtaccatgagtctggtctccaattatcggtaaagaaaaccatggaaacggtttgaccgaaattgtatagttgtaggccacatgccccaactgcattcataacggacgcattatgaataatttcgacgggaattgcctcacgtttagctctgagaactaaatctgtgtgtgtggtggcaccaaatggatcgcccacgaccaagaaagcaacgtcttccttatcggcgttatttaggatctgcttagaaccagtctcaactaattccctatcagccaagatgatctctttaccatagtaagattctaactcttcttggcttgcagccattaggatactggtatagtgttctagataaactctagaacatttcttaatagcttccaaaccacgaacggtaatgtctgatttgtacgagagaccaagtccgatcaaataaagcatttttctcactgtcctttattcactctatatcctgttcgtttttactttgctaacaaccaccagaaaaaaatttcatcccatcgcttagttaacttttttttagaatcgcatgcatggggttatttaattttctctaaaggtaaatgcgaagcccagaatcaaaaagatgaactgtctaggggaagaagacacaagatcctcctgtttttgggattttttattgcttagtgtagtgcattactccttgaaccttttaagatgcacactaactcacccttacgagcggataaccaagatctagaaactcaaccactgttgagaccaaacactgaagaaagccaactcctcaatgatgaagtgagaatcaacgttgcaaatgagacccttattaaatctcgttggcggagtataaagtgcttaattatatatctgctaggtattgttttattaagtttctttggcgtcagcatagtgcagtatattaggggacatgtgccgcccacagatgtgatagaaaagaatctagttcaagtaacaaatttcaaactggtggagtttcagcttgatggttggaaagataatatgggctctgacctgaacaatgatacaggtaagtatttgcaggtgtctatacactctcaaatttggttcgattatgacaaatggccaggaacggaaaatgactcggacgccagaagccaacgtgactggatacggtacatcaatgaaaaagttcttaaaaccatttgtatagatctgaataacgtgaccacattcgatggagatctagtgttcaagaataaactgggagatgttgttggcatggaacccatttgttttaatttggctcaccgacagattaataacctacagttcaaaattttagttaaaccgtctatttggaaaatcgtaaaagttttgaaaaaattttggaatagggattttgaatccttaaatataaaatcgaatttagatatgactatcttcaagagaaaatttggcacgaggtttaatttattgaaacttaatgacgaaatcttagattggaaagatattattgattgggaaaaaatatcggcaacgccccttcggatgattcaaaatatgatcgatggaatatctcttcaaggatttacattgcgggactccagttctgatggatttcatgccgatatgagactgaatccgatcacgattcttggaggggtggactggcttcaccttccgccaggcacgtcaatccctttcatcaattgggaaatcaagctaccggactgtaacggtgagcctgctatcgcaattccaaccttgtcttgctttaacgaaccgattaatctgcaccacgacaaggataatatcgtcgtctgtttacaaaatgaaattgaaggtcctctgcccgatgaactactataccaagaatgtcctcaaaatagtcttacaccaatgagccaaatagtgaatgcggtcctgaaccagaacgagactgttacgttcgcagcaagaggccatgtccttgaagatggtatagataataactcattgattccagcagacatgctggaggatattttccaagaagcatcgtttattcccattactaccaatgctacgtttaactccagtgaattgattcaagagtttcagatcaacgatcttcagctacggtgggcagcgcgcaaaaagctcagtcttgtggggacatttttaggattctttgatctatccttctacgagacgcaccagcaagaccgagttcgcatcgataccattcggggacagatcgatctgtaccataacgacatcaatttcttaaacttacccatgaagcaatggatcaactcttcatcgcacattctgcacgatgaggacacaggaaatacgcagatgaagcttcaatttgatctagaaaatgacgacatggaagtcgtcaatagcttggaactaacacgaaccctgaacgaaatactattccagggttttacagttattcactttaatgcgacgatagatgcgtcacttacgacggcattgggcccgtgggttctcaccgggttagccggagagggtgacactttggtcacgtgaacgtctatctatttatttttataactccgggatgtcattgccggtggtccgaaaatcggcaaataaggaaataagggaagaatatgcagtagtcaaatcatcagtgttctctttgatacctttcagggctaggaatagtgggggtggagtataatatcaaaaaccggacttaacattattggttcggttggaattggctataggcaaactagtctccggcatgatatataaatgacagcctgcaattgtatgttactacactcttgacttgtcgactacagtcgctgctcaggcacgagaataggaggtaagaaggtaacgtacgtatatatataaaatcgtaatgacaaagattaaggtagctaaccccattgtggaaatggacggcgatgagcaaacaagaataatctggcatttaatcagggacaagttagtcttgccctatcttgacgttgatttgaagtactacgatctttccgtggagtatcgtgaccagactaatgatcaagtaactgtggattctgccaccgcgactttaaagtatggagtagctgtcaaatgcgcgactattacacccgatgaggcaagggtcgaggaatttcatttgaaaaagatgtggaaatctccaaatggtactattagaaacattttgggtggtacagtgttcagagaacctattattatccctagaattccaaggctagttcctcaatgggagaagcccatcatcattgggagacacgcattcggcgatcagtacaaagctaccgatgtaatagtccctgaagaaggcgagttgaggcttgtttataaatccaagagcggaactcatgatgtagatctgaaggtatttgactacccagaacatggtggggttgccatgatgatgtacaacactacagattcgatcgaagggtttgcgaaggcctcctttgaattggccattgaaaggaagttaccattatattccactactaagaatactattttgaagaagtatgatggtaaattcaaagatgttttcgaagccatgtatgctagaagttataaagagaagtttgaatcccttggcatctggtacgagcaccgtttaattgatgatatggtggcccaaatgttgaaatctaaaggtggatacataattgccatgaaaaattacgacggtgacgtagaatcagatattgttgcacaaggatttggctccttggggttaatgacatctgtgttgattaccccggacggtaaaacctttgaaagcgaagccgcccacggtacagtaacaagacattttagacagcatcagcaaggaaaggagacgtcaacaaattccattgcatcaattttcgcgtggactagaggtattattcaaaggggtaaacttgataatactccagatgtagttaagttcggccaaatattggaaagcgctacggtaaatacagtgcaagaagatggaatcatgactaaagatttggcgctcattctcggtaagtctgaaagatccgcttatgtcactaccgaggagttcattgacgcggtggaatctagattgaaaaaagagttcgaggcagctgcattgtaaacttactcaatgacagattgatttatttatattatatattccctttttatcgaaaaacttttagtattttctactcgtaacatatgatcttctgttctcactgaaaatttttctttcttcttttccctcttcgcaaaaagaaaatgctgaaaaaatttgaaaaattttcaaatgatgagatgtttagcttaggaaaaatataatgtaaagatagttttcagaacattttttattggtttttttttttaaagattcattatcatctggagttcgttacaacctacacagaggaccgatatacacaatgtcaaaggaggatttcgttattaagcctgaagctgcaggtgcttccactgacactagtgaatggccattacttttgaagaattttgataagttattagtcagaagtggtcattatacccctatcccagctggtagttcaccactaaagagagacctgaaatcatatatcagctctggtgtcattaatctagataaaccttccaacccatcatcgcacgaagttgtagcttggatcaaaagaatcttacgttgtgagaagactggtcactctggtacattggatccaaaagttacaggttgtttgattgtttgtattgacagagctaccaggttggttaagtctcaacaaggtgctggtaaggagtatgtgtgtattgtcagattgcatgatgctttgaaggatgaaaaggatttgggccgctcactagaaaacttgaccggtgcgcttttccaaagacctcctttaatctctgctgttaagagacaattacgtgttcgtactatctatgagtcaaacttgattgagttcgataacaagagaaacttaggtgttttctgggcttcctgtgaagctggtacttatatgcgtactttgtgtgttcatttaggtatgctattaggtgttggtggtcacatgcaagaattgcgtcgtgttagatccggtgctctgtctgaaaatgacaacatggtcactttacatgatgttatggatgcccaatgggtttacgacaatacaagagatgaatcttacttgagatccattattcaacctttagaaactctattggttggttacaagagaattgtagtgaaggattctgctgtcaatgcagtatgttatggtgcaaagttgatgatccctggtttattgcgttacgaagaaggtattgagttatatgacgaaattgtcttgataactaccaagggtgaagccattgccgttgccatcgcacaaatgtcaaccgttgacttagcttcctgtgatcatggtgttgttgctagtgtgaagagatgtatcatggaaagagatttatacccaagaagatggggtttgggtccagtcgcacaaaagaagaagcaaatgaaggcagacggcaaattggataaatacggccgtgttaacgaaaacaccccagaacaatggaaaaaagaatatgttccattagacaatgctgaacagtcaacttctagctctcaggaaactaaggaaactgaagaagagcctaagaaagctaaagaagattctttaatcaaagaagtcgaaactgagaaggaagaagtgaaagaggatgacagcaaaaaggaaaagaaagagaagaaggacaagaaggaaaagaaggaaaagaaagaaaagaaggacaagaaggaaaagaaagagaaaaaggagaagaaaagaaagtctgaagacggtgattctgaggaaaagaaatctaagaaatctaagaaatgattctcatcactccatctcatcctatatatttaacagctttctttttttcaaaaaactttttctattattagattagattttttttagtgtgtatattaataacgtaaaatttctttatcaacgacttgtagtattcttttacttttattttttttacatatgcaacgttatattcttttttaaatatccccatatactaatgatagaacttttaaacttttaggccattgacgaatttcatgacttcaaaacagtagttcagcaattggcccatgacattatttagaaacaaccatgatagcaaattctcatttgattttaagctaatatcgccgattattgcattcctgaatcttgtgctgcaatcaattaatttcaagcacgaaaatttgctttgtagggaaataaaggaacaaaaatctttaatcatttcatttaaggacttgcattcgatagacacagagggatcattgctaacgctcatagaggaatttaagaactttgttacgaaaacttgacagaacccttgtaaatgttgcattattgtgtttgtctctgaatttgtatcgtcttcattaatcatcatttccaaaatatcgtctaaatttacaatattcttccagtcattattcatgccacttttaaatataggaaaacttttcaagaagtttagaatgaattttaataactttattagttttttcactagtttggtaaaattattaataattgataacttcctttgcactagcgcttttggtaattctaaaacagccttattaatttgttcgggcaatagcttgatcatactttccagtttttgaatgattgagtcactgatctcattagaatgaattataaattgtgaaaaaaatttgattaaccctgtataggtgattaagtcacatttagttacccaatcaatcaatggctcagaaatgaatagattaaacatcgtgggcgatatagagttagagttagagaagaataatgcatttgatatattatcactcttcagaaacttgatgcattcataaacggagttgcaatggatatgatataatgactccaaggatgatataacatccgaatcagtgtctgtggggagtacacctgcgggaatttttgggaagtctaacttatatgatgtcaaaagcggatgttctgtgttcgataatatttgggtattatagttatctgatagcttgtcattacaattgaaaactttttcaattaaatcatgagtgaaagttaattcatctgaagacagtgttccggtagggttatttgccgctggtggcagcgaatctagtttatttgcttctgtttcgtttggatgctgtgattcgagttctggttcgttagggttgtcattactactctgtttaacgggcgacccagttcgagaaagactttttctatttaatgagaacggcgatgaaacgttaggtacctgcggcgaaggtgaagagggcgatggagacgataggggcgatatgggatcgttattgtgtactaaggataacgaagcattgttgttattaagggacacggagccgctttcgttgacagttagtttcaatccgcagtagtggtatttggattgacctctcatacccagccttctagtcgttaaatcaggaaaaactgttcttatcaacttccctaatgacgcctgtgataagggcttcaggttgttttgggaacaagatgaagcgtattgagcaaatattttgcctcttggtacgtaactatcgtgctgagatttacaatttttcattaaccaaagtaacgcaaacacttgtctttctctttctctgttttgttccgccagctgcaaagctgcctttgaagtgttctgtgagtccatgctcaggactttgatttctgcatgcttcacgatctgcgcatactcctcgatggttttagatttgttattttctgcaatttgcttagcaattatttcttgcgtgtttctccttgaaatggaagagattcgtttctcttggcttgttttctgttttttcgtactgcttggaattgaggggaaggtattggtacgtttggcagcagtaggaggattattgtttaaggtttcctctgacttgaaagaaagtgggtaagcagatgaattcgatctattcaggctgatagacgctggatacactgagtatgtggcaggttgccgttgtgttgcgggttgtgcaggaggctgtgtaggggtaggagatggtttatgggagccgggaccactaccgataagtggcggtaatattggatttggcgtctccgggcggggggaactttggtgtagcaggctgtatattgacgatgatttgctcgctatgggcgggatattcactgacatggggggcaaataagtgtgtgatgctggcggtggttggctgctgtacttgggtgcgtttaaactgtaccgattactgtttaccgaagatccgttacttggaccgttgctattgtcgttcgagccccgactagtaggttcaatgttattatcaccggacatgggcaaataaaattcaaaataatgaacagacaaaaaactaggcgagaagatgaagtacttggcaggtatttttctagtgaaaaggttttctgttggtttgcgttctttgaagattaccatttactgctattttttttttcaactttttcccaaatcgccatgacaacacgaaacgacaggagaaaaattacgaaatcaaaaacaggttcaactgttgcagcaatagacaccacaaacgtgcgcaagaaaccgcaacgaaggggaggtgaccgtgcttgaaataaaatccgaagatccataggtgagccacgagtttgattccaaactcgtggttttaccaacgaagctgtatatcgtggagtggcgctaccattggaccttcgtttcttctttccctcttccgcaccgtaccagataggaaaaaccgcaccttcgtttttgcatacctagatggtcctgtaacaagaatagagctaaagaaacaagtatgcgtcgactgctgccacgcccggctgatttaggtgcacatcagctacccagcatacaaaggggcttccgtacggttgatggttatttttcttggtgtgttggtgctgctgtatcgctggtgctgtctgcgttattacgactatcgtaggacaaggcctcgagaggtgtagggtaaatcccacttgcacaaagtatgtacacacttgattatccaaataccaagagagtgtggttcaatttacgggcagctcgagctgcccgtaaattgaaccttccccttccccacgctcaaggggttcctgcgccggtgtttcaggggcaggacacgcggggatcgctggcacagtatataaacaataaaagaacaatggagagaggaggcgccattcaatatcagctcactagagtgcatagacgtatagacacaggaataaagatagaaatagggtaccatggagctgccttcaataaatagcaccacaagtatatccgacaaccaggagttaaggaattactatgacaagttgctgttcaagaacaatagtggcaagtcgctagcggatttgccaggaaaaatggcagattttaacgacaacagcgctgctgcgcatccccgctccagagttgactttatcaacggttacatcggtttcagagaggataagcagtctcttctggggcagaagaacactaaaagggcctcgttcagcgcatttgcggacgaaggaaggaaacagagcgagatgagcattaacgggaagagccctaatttgtctcttttctcatttgagtttaacggcaccccgactcaggacagaaagccatacaaacaggattacttgaatgtgatgaacacttcgcctaacaatattctttctcccttaaacaacagctcccaaaaatactatccacagaaacagcagcagcagcagcagcagcagcagcagcaacagcaacaaagcatctttgacccgggaagaagatcttcctatatttctgatgcgctgattcatggcaatgcggctacccagcaaccacaatactcgcaacctgtatatattaacaacaacccatctttgcaagtaccatacactgctccttccgagtatactcagcagcaacagtactcgtcacccttcaatgctaggcgcaacacccagccagtgctgaacttgcatccggcagccgctcccacaaacgatgccggattggcggttgtcgacggcaagaatttgacgtcatccaaggagctgcatgacttatatcttgactgcgggtcaaactattttgctagtgataaagtttataaatttattgacagcataaagggaactttacgcggggataatgtctccgcctccagttccaggattatagagtttttggattttttgaaaaattgtaatctgaattacaacccacagtctgacgcattcatctccactgctgtttcaaacgcttcgtcgaccggggcggccaaatccaagaacagcacttcaatgcatttgcactataagccattagtgttagtatcgttgaaaaatggtaagctcgaactgttgtctaaaccacaaacggccacacttatactgaaaaggggcgatttggtcattattgatggtgatcgtggtaaagatttagttttggtggtggaaccggttgtagatataaatttggcactatttataaattttttgaagaaaaaaattcactttgattctctaatcaccaatagtcaacagcatttccccaatgaccagtttatcaagactctggttgatacaaccaatggtaagccggtcgctcatgagttgaatccgaagttatatgatatcattgaactaacgcaattgatcatcccatcaaagcaggttctgagatttgccaccccgtgggaatcctccacgaatttacacaacaaattccaggatgagctaaaggctcttcacattgcacagctaaaactgaggtcgctaaataacaataactccggtggcgggttgaacatcaaaatattgaatgcagagttccaattcgacagaaagaaattgactttctactacatttgccaggagcgtaatgatttcagagacctgatcaaagaactctttaagttttacaaaacaagaatttggctttgtgctataccgaacaatttatcgatagattccaaattttatgattcaaacaagtttgagtgggagatgtatcaggatatgatgtcccactattccatggacaacactggaattgtcgtggcccctgaactgaatcgcttgaaactggacgacttccagatcggtgtttatatggaattggtgaaggttttgttcggctaacccaaacttatataatcattataaacattttataaacttatacacttttttaataatctcaccatgtttttcttatgtgttttgtttgacaatgacattactccctacaaacatgtgcgcgtttgtgacaaaaacataaataaaacaaaaataataaaaagtcaagtgaaaagcactgaaatctaaaaaataaatacatatacatatatatatatatatacctatttcgtttccgcatagaagaaattggaggcaactagttgcaggttgttttccttagcccatttgccaacaccggtggcaggggtgccgtaaccccagttcggtctatccttaattttcgagaacttagatgagtccacgcccttaggctgcttatataacaagaaaacatatctgtggggaccggatcccttgggtggagctggtcccatatattctattagtgtgttcgagcccttcgtattgaactctgatgcaaaaaattcggttgctccggaggtctcgtgagtagcctcattcaacagctttaagtcgcattctaccaagtggcagaattcagaccacttgtgatctgtcttagagggagcatccggatcggtcattaccagtgtgaacaaatcgtcgtcttggggaacgtacgcattcgcctgtggtacgcttttttgcatttgcttattgaacgtgaactggaattggggcttggaacgtgccttctcagtgggcagcgtgttacccatggcaacaggtgcacttgatgagtactctacggcaagtatcccggagggttgaaagcttgtgtcatgaattacatcctccagaatgccgtgcttcttgtaggagtcaatgcttgcttgtgcgaagtctattgcttggttcatgttttttgcttgttctcttgttcttgtattgatgcactggtagggaaaaggagcactgcaattcgtttcttgctgccccctttttatataccaattgagatctttccttccctgaacagcccctctatcccttaaaagatagaaaagttcaaagggataggaaaaatcaacgagccaaaaaaaaaaaaaacggaaccgttcggcatgtatatattcactatttcatatacgcgtttgcacaatatactctatcttatccgtatctatacgagccggttgctgcaccttacatgtcatagttgaaatcaacggtcgtgttttcgaccatgtaataattggcaccgaccagttgcagattgttctccttgatatagtcataggcacccgcaccaggagtaccgtacccccaggagataatgttctcaaccttggtaaaagtggacgaatccgctcccttgggttgcttgcacaggaagaacacgtatctgtgataaccggagttctttggtggaccaggcccaatatagttatttctcacgacacccttccccgaaatggcaatatctcccccaggtccgtactcgacaggaatatcagtgatgatgtagtgacaaacctccgaccacttatgttctgttctagagggcgcgtccgggtcagtcatcaacaaagcgagtttatcctcggctgacaattggcttttatcgaagggcgtgaacttgatggtaggagcggcttgcgtagcttccattggcatgggattgcccaatttgatgtcgtcagaatcaacgtacgaaaccgacaactcaccaagaatctcgaacgccaagtccttgacggtgtccttaatgatgtcctctttgttcagtttagcaacgatggcactagacataatatatatttctattactaagtactcggatgggtaccgaaagtggcagatgggcagtgtttactcaaacaattgatggcaacattcaattcctcacctggtgcgcacttccaataatgagcacgcttggcacttttatattgttcaaaaaaatgtcaggcaagatcttttgaaaaaaaggtaccgaaacggacgtaagacggaaatagaatttgaagataaagttatatatcactacacacgaatactttcttttttttttttcacaggaaaactgtggtggcgcccttgcctactagtgcatttcttttttcgggttcttgtctcgaggaaattttagcctcatcgtagtttttcactctggtatcgatgaaaaagggaagagtaaaaagttttccgtttagtacttaatgggattggtttgggacgtatatatcgactggtgttgtctgttattcatcgttgtttttcggttagcttcgaaaaaaaaatagagtaaaaaccaggaatttaccctaaaaacaagaaaaaataagataaacgaaaatatggccggtacatttttattcacttctgaatccgttggtgaaggtcacccagataagatctgtgaccaagtttccgacgccatcttggacgcttgtttagccgaggaccctcactccaaagttgcgtgtgaaaccgcggcaaagactggtatgattatggtctttggtgaaattactaccaaggcacagttggattaccaaaaaatcgtcagagacaccatcaagaagattggttacgatgattccgccaagggtttcgactataagacctgtaacgtccttgtcgccattgagcaacaatctccagatatcgcccaaggtgtccacgaggagaaggatttggaagacatcggtgccggtgaccaaggtatcatgtttggttacgccacagatgaaactccagagggtttgcctttgactattcttttggctcataaactaaacatggccatggctgacgcgagaagagatggctctttagcgtggttgagaccagacaccaagactcaagtcaccgtcgaatacaaggatgaccacggtagatgggttccacaaagaatcgacaccgtcgtcgtctccgctcaacatgctgacgaaatcacgaccgaggacttaagagcgcaactaaagtccgagatcattgaaaaagtcatcccaagagacatgttggacgaaaacaccaaatactttatccaaccttccggtagattcgtcatcggtggtcctcaaggtgacgctggtttgaccggtagaaagatcatcgtcgacgcttacggtggtgcctcatccgtcggtggtggtgccttctccggtaaggactactctaaggttgatcgttctgccgcttatgccgctagatgggttgccaagtccctagttgccgctggtttatgtaagagagttcaagttcaattttcttatgccatcggtattgcggaaccattgtccttgcacgttgacacctatggtactgcgaccaagtctgacgaagaaattatcgacattatcagcaagaactttgacttgagacctggtgtattggtcaaggagttggacttagctagaccaatctacttgccaaccgcttcttatggccatttcacaaaccaagaatacccatgggaaaagcctaagactttgaagttctaagcttttttccttttggacttttttctgccttcaacctcccatgttttcatttgctcaacacaagtcaacatgtacattataccgtatttgatgcagggacgcaataccatcatattcttgatatagactcatttttctcaaatcaaatttgtatcgatttcattttgcattatacaggattccttttcctttctaacatttaatacgtaactactaatattaatatatacctccttcaacggatcaacaaaccaaactttatcttattcaaatagaatttaacagatccaacgccttagttaactcatctttggcggtgggcaggtcttcataattcaatgcgcttatggcgtatttggcaagtttttgaatttgctctattttactggccctgtccataatttttgtcaactcatcctttgtatacgatttatgctctgctgcagcaggttctgatggtgcagaagggcgcgtaagatccacttctttcttcacaacttgttgttcgtcttttgttattgcatcttcgttcttgtcgacggtctgttcttcttcgtttacgctatcggcatcatcaataaattcaggtacctcatccacaggctcgtatgatgttgtttggtcttttggggctaggccttcgactttatcattattattgttttccaaatcgcttgtctggtgatcaacatcttcatccttaatctcctcgctatcatccgcaaaatctgcataatctaacgttttctcgtcgctggaaccaatttcaccctttgccaatttactcaaataaattttgcaatacttaattcgtttttgtaatgaatttgtactcgtttcacttatattttccttccacaggtgtaaaatgcatgaaaataaatcaatacaacaccaaagtgatctttttaacataacatcccagggaccatcttttagctgtttcagtttctcgttatacaacgacattgtaaaatttagcatataaattttggctttttcttgatcatgtattagcgtgttcataacgtgtaagcttttgtcactgtcttctgcttcactctcgccgccaatctccttcttaaacgcttcaatagtatcaagaagttctgtcgctagtgcggtcatctcttgcgaccgatcttcttcactcagtatcaattccaccgcatataactgaagatagtatccgatgatccctaacccaactttgtcaaaatccttcgctgtagcgacaacccttgcagcgttactagccatagaatttatttaaaatgtggacaattagtttctaaaaattgaatcaaataaaataagaaagcttattgttcctttttttgtcttcatctggaccgtttggataagatcattcaccaaatcttagtttttttttttagtttccttctccaacgatttcataataataaaaaaaaacaacaaaaaacacgattgagaaacatcaatatgaactaagcaatagctaaaaaaaaaagaataataaaggggaacacagtataattctcgagaggatggcgttggaagaagtggtacgatacttaggacctcacaatgagatccctttgacactcactagagactcggagactggccatttcctcctgaaacattttctgcccattttgcagcaatatcatgacacggggaatattaacgagaccaaccccgatagtttccccactgatgaggaaagaaataaattactggcacattatggaattgctgtaaatacagacgaccgaggtgagttatggatagagctggaaaaatgtttacaattattaaacatgctaaatttattcggtttgttccaggatgcattcgaatttgaggagcctgaaacagatcaggatgaagaagatcccagccattcgaaactaccagaaaacaagaccaaaagtgaaaattctaaggataatatcagctcaaagaggattaataatttacaagatatgagcctggattctgatgcacacagagaattaggctctcctttaaaaaaactaaaaatagatacctctgtaatagatgctgagagtgactccactccgaatactgccagaggcaagcctaacgatgatattaataagggccctagcggcgacaatgaaaataatggcactgatgacaatgacagaaccgctggacctatcataacattcactcatgacctaacttctgactttttaagcagtccactgaaaatcatgaaagcactaccttctccagttgtaaatgataatgaacagaagatgaaactagaggcattcttacaacggttgttatttccagaaattcaagaaatgcctacatcccttaataatgacagcagtaatagaaattcagaaggggggagctcaaaccaacaacaacagcacgtatcatttgatagccttttgcaagaggtaaacgacgcttttcctaatactcaattaaatcttaatattcctgtagatgagcatggaaacacaccattacattggctgacttcaatagcaaacctggaattagtgaaacacctggttaagcatggttcaaacagattatatggtgataatatgggggagtcatgcctagtgaaagctgtcaaatcagtaaataattacgactctggtacttttgaggcacttctagattatttatatccatgtttaattttggaagactcaatgaatagaacaattttgcaccatatcattattacgtctggtatgactggctgttcagcagctgcgaaatattatttagatattttaatgggatggattgtcaagaaacaaaatagacccattcaaagtggtactaacgaaaaagaaagcaaaccgaatgacaaaaatggggaaagaaaggactctatactagaaaatttggacctgaaatggataatagcaaacatgctcaatgcgcaggactctaatggcgatacttgcttgaacattgcagcaagattgggaaacatttcaatagtagacgctttattagattacggtgctgacccatttattgcaaacaaatcagggttgagacccgtggattttggggcaggtacttcaaaattacaaaatacgaacggcggtgacgaaaactcgaagatggtctctaagggtgattacgacggtcaaaaaaatggaaaggccaaaaaaataaggtctcaactgttgaaaaacccacctgaaacaacttcgttaattaatgatgtccaaaatttactgaattcaatctcgaaagattatgagaatgaaacagtgcaatataatgagaaattagaaaaactacacaaggaattgaacgaacagcgagaagaattagctaattctagagaacaactagcaaatgtgaagcaattgaaagatgaatactcactaatgcaagagcaattgaccaatttaaaagcaggaattgaagaagaagaggaaagttttagggaagagagcaaaaagctaggaataattgcagatgaaagttcaggtattgattgggactctagcgaatatgatgcagatgaacccttcaaagtagagttcctttcagatttcttggaggataaattacaaaagaattatgaaggcgatatttccaaactattagaagcggagtcgaaagagcagataatggaacagatacgaaatcaacttcccgcagaaaaaatccaatcgatgcttccaccaacggtcttattgaaggcaagaataaatgcatacaagcggaatgataaacacctaaccaatgtattggatacaatcagcaccaaacaatcagaattagagaataaatttagaagagtgttatctttatgtttgaaaatcgacgaaaataaagttgacaatatgcttgatggtttgttacaggccatatcttctgaagacccacaagacattgacactgacgaaatgcaagattttttaaaaaagcatgcttcatgagggcatgtgatttcattgcattaacttttatgactttatttgaagttatttttttgttttagcgctttatttacttttattttactacataactgtattcttacaaaatttttacgtactcagatgggatatataggcacttgatgttttattttcttgttcttatcatatatccgatggaataaaatgttctattttgctggctttttccaaaaatattgtttatgtgtccttctacaagatcttaagcctgtccttccaccttttaatgaactcaccaagtttcttctctcgtaatcatcatcgttttctaaatcgtagaaatactcttcgtccaatggtttgccggcggcgtccttaccatgacggtaaatgacaccgacacatttcgcgtcgctcaaaatcgaacgtaattcatctcttgaaagctcagaaatttgtgagttcacctgctgtaattggaataatggcgtctgctggacgtttgcaaaagctaggtgattggttaaaatatgctgtagatgcataacatcaatatttcttctagatagctcatccaaattctctttcaccgatttttttggctttgaaggtaagaccctcttgttaagttttggtttcttcatagtcataggatttttatcagatgatagtgaatcttgtctcagggtttgttcctcgtgatcaacagaggagacggatgaaagtggggacgatttagaatttaggaagtggtttagcatcctttctgcaacgccagaatcactaccaattgagattttgttgctatccttaagtatttttttgggtctgtccatcgaagtgtcagtaaaaatcaatggatgcttccttatactacccatatgtttcgtttcactttcactttcaaattcagctttcttctcgaatcttaacggctctgaagaagagtttttttcttttaacgaaatgcgaagtaaaacctgcctaaaatccaacatgatacccttgtaatatgtcatataaacggtgtctccctcttccagagtgaaattaatgaatcctccctcgtcttgaatttctttaacacatttttcgttagagaatctgggaacaagcctatatgccctattattgttattcatggtatcctttaattgataacaatcaaattgcttacgataggtaacgattaatccgttcatactgaagcagtgaatcttcacttcatttgtttgtggtaaataagttatactagcgtgtactctggatatgaacttattcttacagagcgcaacatcacattgcgaactattgcgccctacagtaatggtgctgatcttgctaggatctagttcagcattgatgactctagtatgccttgaaggagaagaaagtttggaagaaaacttgggtgacgtttctgccaactggccaggaaaagctggagaggaagggatggcgtcaaccttattcgacctaacgggagacgaaacccttcctatactggaagaaggaaatggagttggataatctcctttcccgaaatttccaattgattctgacgcagttttaccagctttctcataattggatgagggacaattaggctgctgtttgtaatttggtggagagtacggatccactgtcctgtagggggacgaaggaaattgcgagctcatgccttcttgtgattattaatctttgatgtgtcgtggcagatgtatatggacttttgtacgtaaagtagattgctataattcaattctaaatgaatgaaagtagagaaagagtttccattgatgaattttagtttacgtcgactgccgctgttcattctcatcaaaacacgaaagcaaaccatagagatgaacttaagaaaaaagggccacgggatttttttttcgcgttttggcgttttcatatcaaaaaaaaaaaaccatattaacatctgtacattattattaactaaacatccgtacacaaaaggttttccaagacaaaacgttgtcgagactattctctttcgaagaaattctaaaacacacttcggcaggccggcaacaagaaggcggccccttggggaaagggaagtcaatccgtctgcccgttctctaggctgatggtaggcagggcgatgccatactggtgaagtgtggtccgtcggtctgtctcctccaaacgttgatgttctcctggtagctttctcatcaccgtcaatattacaagtgtaagaatgagaaatgctctatatgagggtactattaaatttcaaaaatgtttacttttaagaggtatttgctaaagcctcatacaaataatatagacaaaaatgggtagtatgtagtaggacattgagaataaaactgtgaacctgttattgacgaccgtggagaaatgttatgattatctgaagagaaatatcggaacgcatgcacaccaaatttatacttagcaagactggacgatacgagactggtatacttgtatgaagacagaatagtgaacgaaagacatgcgcatgacaacaaatttaccgtatagaagaaatattctgcttgtatgcctgagggaactcgaaaggatcaatttcaatggcgttgtaacagtcacgaaaaaagtgtaactataagataaagcaaattgtactaacaaacttaaccaaattgcacaacaatttgattttctttttaaatagagggtactccttcattcggtaaacgtcacaacaagtcccacactttgtgtaacagatgtggtcgtcgttctttccatgttcaaaagaagacctgttcctcctgtggttatccagctgctaagaccagatcttacaactggggtgccaaggctaagagaagacacactactggtactggtagaatgagatacttgaaacacgtttcaagaagattcaagaacggtttccaaaccggctctgcttctaaggcttctgcttaatttttatactaagatctatttctttaaatgaaaactcaataattagagaccttatataataaccaactgcaaaaaaacttctaaacaattagttaacaaatctccagcctttttttaatatatctttattcatatgtaacgcctttgagtgcttacgggaaaagtagaattgatagtttcgtaattcatgaccggaaaaagtgaaaaattattgttcgatgaatatatacagagatgtcttgaactgtttttgccagcatcattcgttatagggagcaaagttagtgcaacccagttaccagatatctagtcaccaagaagaaaacccgtaaaatcgtaggtcatggtcgaagattccagagttagagacgccctcaaaggtggtgatcagaaggcattaccggcctctttggttcctcaagcacctcctgtcttgacatcaaaggataagattactaagcggatgattgtggtattagcgatggcatccctcgagacacacaagatatcgtccaacgggcctggtggtgacaaatatgtccttttgaactgtgacgaccatcaaggtttattaaaaaaaatgggtagagacattagtgaagcaagacctgatattacccaccaatgtcttttgacgttgctagattctccaatcaacaaagccggaaagctgcaggtctatattcaaacaagtcgaggaattctgatcgaggttaaccccactgttcgtataccaagaactttcaaaagattttcaggtttaatggttcagttactacataagctttctatcagatcggtaaattctgaagaaaagttacttaaagtcattaagaacccaattaccgatcacctacctactaagtgccgtaaggtgacattatcctttgacgcaccagttatccgcgttcaagattacatcgaaaaactagacgatgatgaaagtatatgtgtctttgttggtgccatggcaagaggtaaagataactttgcggatgaatacgtcgacgaaaaagtcggcttgtccaattacccattgtctgcctcagttgcatgttctaaattttgccatggcgctgaagatgcttggaatattttatagtgtttaagtctacttggcatcctctttgtataataaacagtcaatatacgatatagaaacaatcgagttagcgattaattcgactgcacctctatccttcccccacgcgaaataatggttcggaagtcatctgaacgaggctcagtctttgaatatttcacctaattcggaccctgaacggtgaacaaaatttcaatatgatataaacaaaacgtggaagaactcttggcaaagacaaaggataaagagctcgttggaaaagtttttttacaactgcaaacggcacttaatattgctaattaacttgccagtatcatttccctagcgccttgccgatttggtctttttggcactgtttattcttactaaacgatattcgtaaaacggaaatcaaagaaaaccaaaattgaagtcccaaagcgtggcaataaaagaacaagtaactgcaagaacaccaagaagctacagtaagaaatgaaaaggattttctctggtgtgaagtccccaaagttatctgctcccccaaaagttttcaaaaatgatgagagcccatccactccgagctctcccaaattcgaccaagggcttcgaagtttatcagcatcagcttcaagactcttcagtaactcaatatccactcctgggagccctacgttagatcttccgcaagaacactctattaatggtgatatctcaccagaactagtaccaatcgttactttactctctgcacaggctcataggagataccattatggtatattcttgatattacatgatttgaagacagacggaacacctgccgcgcgtcagtgggaagaatgctatggtgtgttgctaggaactcagctggctttatgggatgcaaaagaattatcagattccaagaataataagaacacatcaaccatgaaaaaagccgcatcgagaccttcttttatcaattttacagatgcttctgtgaggagtttggacgctaatgatcaggtaatcattgcatcagagaacgaaaagacaaagaaagatctagacaatgttcttgttgtttcaacaactttaaaaaacaggtatttcttaaaattcaaaaattcaaaatcattcaaaacttggaacgcagcaattaggcttagtttgttcgagtttacggcgttgcaagaggcctacacgggctcatttttgtcaagcagaggtgttaaacttggtgatatcaaagttgttatggcagatacaaaattcacttatgaggactgggttagcgtaagattcgggacaggtatgccatggaaacgttgttatgctgttatttctccacagtctggcaaaaaaaagaaaaattcgaaaggttcaatatgtttctatgaaaataacaaaaaaaccaaaaaatcaaacataatgacaacggtagtagatgcacgggctttatatgccgtttatccttcctcgccgatattaatcgacacatctacaatcataaaattggaaggttttgtctcttttgacaaaagtgaggaacctcaagaaaccaacctatttatcatgcctgaaaagcatcaaggtgttccgggatatgacactattattcgcttcttaatcccagctatgaacgcgttctacttatatggtaggccaaagggtttgattgccaacagaactgacccagactccctgctgtttgccttacccactcttccgcatatatattatttgcaggtggatgacgttttatcattaacaaaagacaaaaattacatacattggagtgctgctgattggaggaataacattgttcaagtattacagaaaaaattaagtaagggctataaaggctgtggtaataaaactgtatcagtttcatctgggatgatgaagtcgccggcaattagttcagctgaattatttgaagggtacgattctctccctgaaagacaaatggaaagtccgcaaaaatctaagatgaagtctcctacattagcatcgaccgatgatattaattccgcttctgcttccgtaaactcacatgctacctcagtaaaacaaactgaattatttgtgactgataattcttcaaaaatcaatgactctgtgtcggcgcagtccagtgtcactactaacttcaaagatacttttaccaccccaatgacatcaggaatgctcaaccatgaaaattcagagagaagctttggttcaggattaaaactcaaaatcactgattcaaatttggaaaatatggaagacgttgaagcgaaatctgctaacgaattctctacgacaccagaagacaaacatattcacctcgccaatgcagccgaattatccgccctttacgacaaatattccacatctccgtttggtaaatcggaggctaattcaagccctaaacctcaaaaattggaagttaaagatcggtcaaaaaatgaaaacagaagcccctatgagagatacgtaggtacatccgctgaaagcaagacatttgaaataggtaacgtcagagagtcgaaaagtacgataaatacttccctttcttcgcctttgagggtagaagatagtagacgttcaaaaaatgaggacctgggatctttgaaagagtttgaagagttatctcaaaagattagcaatatgggaatggcaaatatttcttcagaagctttaagtgacacagcagaaaacagttcttttgttacggacctgaacttgaatatcaataacagttcatcggtcaatctcaatgaagaacaacgtgtgccggattttggggaggaaaacgtatttgatccagattatatggaacaaaaccaaatgttggaaacagaaagtaggtacactacggatgagtttgacttttcagataatcaggatgcagcatccagtaattatagcaatgggcaaaccaaccgaacagtaactgaaaccctttctgccagtgacagaaatgacaagatcccacattcttctttatttacaaacttaaaccagcttacttcgaatggaggaaactatcaggatagggaagatttctctggtgatcaaataaacaaacctcaacaatctcaaccacttcatgtgaaaggaccacaaacttcgtcatttggttacagaaattcttcagccaatagctcgcagcctcaagcaccatacccggttggtcgcccgttaggtaagataagaacgggtccgctgaccgtccagcctatgcaacaaggtggaaactcatcaatgtattctttccaatcttcgcaacatcggtttcattcgtcgcaacagcgccaaaaccaatcactttccttcagaaacaatacctatggaagtggtaacaatcaaaatacattccatccatcgccgcaactgcaacaacagcctcaaaatatgagatatttgaataataagttaccaataaatgatagatctccaataccgcaaacacagcaccatgtaccagatggccgtcccagcctccatataaataccactaaccgcacaaatccgcttactgcacaaagtggattttctcaatttatgcctcccaatagcacatcaaccaacccatattccagctgattcatttatatttcatcttttcttttttttttttttacaattcagtagttttatataacttcccataaatgtattatttttttaatacgactataatatacctctatacccttatttatctctttacctttgcttttaagctaaacaaatcttcattaacaggtattatattactggcgtcgcgtttcgtttaggcgcatcgagccgagacttcagaatcacaaatgctttgtatatatgttacgtattcagtattgcccaacatgcaactagattcaactaagcagacgtgggtacttacatgagaagcagatcattgaaattttactaagttaaagaagaggaagggctccaatgattgtaagaatgatacgtctttgtaaaggtccaaagttgttgcgaagtcaattcgcatcagcaagtgcactatattcaaccaagtcattgttcaaacctcccatgtaccaaaaagcggaaattaatttgattattccacatagaaagcactttttgttgcggtcgattcgattacaatcagacattgcgcaaggaaagaagtccaccaagcccactttaaagttgtccaatgcaaattcaaaatcctcggggtttaaagacattaaacggctattcgtcttatctaaaccggaatccaagtacattggtcttgccctccttttaatcctcatttcaagttcagttagtatggctgtaccttccgttatcggtaaattattagacttggcttccgaaagtgacggcgaagatgaagagggctcaaaaagcaataagttatatggttttacgaagaagcaatttttcacagcattaggagcagtatttataattggagcagttgctaatgcaagcagaatcatcattttaaaggtcaccggtgagagactggtcgcaagattaagaacgagaacaatgaaagctgcattagatcaagatgccacatttttagatactaatcgtgtcggtgatttgatctcaagattatcatctgatgcatctatagtggccaaatcggtcacacaaaacgtctctgatggaacaagggcaattattcaagggtttgtcggttttggcatgatgagcttcctctcgtggaaattgacttgcgtaatgatgattttagcccctcctttaggtgctatggcactgatatatggtaggaaaatacgaaacctatcaagacagttacaaacctcagtaggtgggttaacaaaagtggcagaagagcaattaaatgctactaggacaattcaagcatatggtggtgaaaaaaacgaggttcgccgctatgcaaaagaggttagaaatgtatttcatattggtctgaaggaagcggttacttccggtttattcttcggaagtactgggctagttggcaacactgcaatgctgtcgttattattggttggaacaagcatgattcaaagtggttcaatgactgtcggtgaattatctagtttcatgatgtatgccgtgtataccggaagttcattatttggtttatcgagcttctattcagaacttatgaaaggtgctggtgcggctgccagggtttttgaattaaatgaccgtaagccattgattcgtccgactattggaaaggatcctgtgtcattagcccaaaaacccatcgttttcaaaaacgtgtcattcacttatcccactcggcccaaacaccagattttcaaggatttgaatattactatcaagcctggtgaacacgtttgcgctgtcggtccatcaggaagcggcaaatcaacaattgcgtctttgttgctcaggtactacgatgtgaactcaggatcgatcgaatttggtgatgaagacatcagaaatttcaacttgaggaagtatcgaagactaataggatacgtgcaacaagaaccactacttttcaatgggactattctggacaatatcctctactgcattccgcctgaaattgcggagcaggatgatcgtattagacgtgctattggaaaagctaattgcacaaaatttttggccaattttccagatggattgcagactatggttggtgctagaggcgcgcaattgtccggtggtcaaaagcaaagaattgcattagctagagcgtttttactagatcctgccgtccttattttagatgaagcaaccagtgcccttgactctcaaagtgaagaaatagttgccaaaaatcttcagagacgtgtggaaagggggttcactactatatcaattgcacataggctttcgacgatcaaacacagtactagggtgattgtgttaggaaaacatggctcagtggttgaaaccggttcattccgagatctaatcgccattcctaatagtgaactaaatgcgctgcttgccgaacagcaggacgaggaaggaaaagggggagtgatagatttggacaatagtgttgcccgggaagtataagaagttgccgcagtatggaatcacttttctatgccacagttatggtatgtgttggaagacaattaattatcgcattatgtttgctgaatatgaaattgtgtattctataatttaaatgatgcccaatgtaatttacacaaacagtttttttttaaagctccttgtacgcctttatacacattaaattaatattagatgcacaacatacggtacgtttaggaaactcaaattaagctttatttttttacttttttattattgttactattattcttattatcaacattatcgttttcatatctttcctgagtacaaatatgactgaaacttacaaaaaaaaaattaattatttattactattaatgattagatgttacgcttttttataaaagtgagagtgatactcggtttaaatcatcgtccacccttcatccgttgtttcagcaggtgtcagtttggttgcatctacattttcctctttcttgcgcggagttttcactcttgataaagtaacgcttcttgcatactcaagttcgttgtaaattgcacttattgcagttttaatcccatcttctttggaaattttcttctttattaatccagctctatccttcattattttgttcgtcgtagctacttttaaagcatctgctaatgtttgagcgttaagtttctttaaagcaataccaactccaatgtcttctactctacctgcataaaagaactgatcaccaaagaaaggttttataacagtaggtaaaccagcacgtaatgaagctccagtagttccagaaccaccatggtgaacggcagcatcgacttgtgggaacaaccaatcatggggaacgtttccgatatttaaaatgtttcttggaagatctacctctgtcttctttgccgccttatcgcccaacctttctgaccatcccttatttaaaatgcagtatacatctgcttccataactgcttcgacaagagcttccgtcatttctttggcattagagactacaatcgaaccaaacccgatataaaccaatttttttccttttgatcttgcctcagaaataaattcttgtaattctgctggcggtttgaaagtactcttatcatcaagaaaccaatatcctgtaactctcacccactcgctaaaatcaattgatggcggaaaaattgtaggagaaacattgtataagaaaggaacattattctgctgtaaaagaaaaagatttgttttccctaaacctagagtttcaactctccacttgtttacttgcccactaattcccttccagaaaacgttttcgaaaaggacatgtgtcaggtagttatagttaccgccccttttttgatctggtacaataaatgcatgtggatatgctcttgttcttgtccatggcatggtaaatgctcgaaaataaggaatttgcaatgcttcagtaatatgaataccaaccatagctgagggtgattcaatcagaatatcaaattttcttctgttacaaacctcccaagatgtctgtaaaagagcatcgatccatcccctaaatttgctcgaagcttctctcagcattttaacattcattgattcattttccaccatcaaggacatcaactccactgggttaccagcaatctcttcaaactggattccatgactttcaacaaagtctctaaattccgaatgtgtaattattaccacttggtgaccttcttttatcaagccctttccaagtgcaatatatggttgaacatcccctcttgagccaatcgtcaataatccaaacttataactcttgtttggttttatgcttgttttatagtgcggattctcatcaatcattaacggtacctcaaagccctcggcattaattttatcttcgaaaagcttcaacttcgctgagtcagggttatgctgaacatcgccaagagaagcactcgatatattcgatccttctgcactgcttgcatatatgttatctaagagctttaaaagaatgcgttcaatatcatccctggcgacctcagtgctaaattcaaaaaatagctcctcgtgaccgtgaattactataaccaatacaaaataaccaaatcgaaatcccttttctttatagcatgtctccacatcaaccaatggcaaaaccatgtatgtattagaccctggtaataacgatctgaagcacaccgtatcattggatacgtaaatcttaccataaacgggaacatttctattcaggtatgtgtagtaagtactgattagtgacttctctttattaaacttgaaatggtacctgaaccgctcgttagcagaaacctcttctgtttctttaatcaaataggtatcatccttttgaaacgggataaacttgttccggtagtgtattggtttggcagcccacatttcggcaaaatttttgaggtgacttggcttccaagctacggtttgctcttgactatcttcttgttcatgaatatgaatcgtggaatgcacagaagagtctatatcattcgccgcatctttatatatttcctccacatcctcaacttgagaatcttcaagaggtttagctctacgaaaccaactattgcttctttctctaaatctgaatcgactctttttcccattttccgaagaaggcacagccgaagttggaacattcaaatattttgaatcctcgccgttattcttttgctcaactgtagctggtgtctcttttccaaaacttgattttgatttcttggctggaatatcataataaagtgtattaacaccggatttctgcaatatagccaactgttcgccaaggctctctttgacctgactaccggacccatccatgaaaacaaacatgaaatcatcgatagcataggtctgtgagctctccaaagctcttaatctcaatgttaaagctttgttgactataggttgatcatctatctctataatgttgggcagcggaatttttaaacttatcgaattgttttcagaattctgagctgcgaactgctcctttttcaaagcgttcacccacgatttagcggagaactctgaatctgcattgaatttgaatgtactttcatctgtgtaaagcttaaatgttttcgtagcactcccgtttaaggtatgtttttgtgtttcaattttttggacctccctcaaatctatggttaaaaccggaaagtatagctcagttgatgaggtatacatagaaaataaatgattctttagtacgcaccaatacctggtagacctaattagttttgtcctgatattaaggtttccagacattttaaccgaccgaggattcttaggtaaatatgcaaagaataggaaatgttttgttgtaataaaaatatggccttgaaccaacacatctttaagtagccatgcagggaaatcattcaaaaatggttcctgttcgtctaaacaaaaccgctgtctcaacttagccacattgtcttttgacagtttttccctagttattgagaagtcgaataaagttggctttcttttgtctaatcttggtacttccggatgcgatttagttttgagattttcctttttgctttttacctcatttcgaccaatgttttcctggaaactatcactggaatcagattcttcagaatcaacttgcgacaacacattcatttcttgagcattattcatccctgcatacacactagcagtagttaataaaccggcaatacttttcatcatatacttggatttcgccaagtcatctgcattatcgttattgtaaccgttttcgtcatcatcactacgggcttcatttggactgtcctgcagttcttgctgctcagacgaccccatcgataaactgctatttgatcttcctctccagcgcttgaacttcgaaagtgaccttgaaaggcgatgatgcctaggggaagtttctggctcagatggcttatcaggtaccaacgaaatgcttggttttggccccgcctcgctatcagacgctgatatgatttgagtgatgggcattcttttaagttatacggattttcaccaaagcataaagtgcaactgaacttctgatgtttactttttgacagccatgactttatcagtgataaatgcaatgactttccgatctactccttctgttgacttttagtcccttttttcttagatgttatgttacagtcacatcagggttaagtttttccaagtcatctcaaaacaatgacctattttatttctagataaaccctggtgtaagcagggttaattttgtcccaaacgggcaaaatataaatacccctttcgggaaataaactaaaaagagttctaattagccaattggcaagaaagctcgatgaagaatcattatgggtttagaaatcagatttccttactttacaagttctctcacgcaagcttgatcgtttttaaattttctacgttcattcaagacaaagtggttacagatagaagtttttctcacatttagattattttttcctgatagtattaaataacacgtacgatcaacaaattgttgctcagtttaagtgagcctagagaattaagctttattactgctgtattttctgttattttgattgccttgggaataaaggaaaggtttggaggggcacatcttcctaaatagcagtaaggaaaaagaatcgcgtgtgaagtcttttaaatcaacatagttatcctcggttccaactattttactttcgtttcaattccgttgttcttaactaatcttcttttcttttaacttgttacaagccagtactcattgcaaaatcaaaaaaaaaaaacacaactaataaactaaacaactaaaaaaatgaattctccaacaatgaaatcggaacaacttactccaaaactctcaccaatgtccttttgtttggatgaccaaagaaatgcaggctcttttcaaaatctattgaactcacctacgaagctaaaattagacactggcccgattggtaattccttgttatatccaacatcactctctaaattgagcgagttatcaagaggtggacgttctaaacaaagaaggggctctgacactatgaggtctgtatcgcctattaggtttcagtttttgaacaacactccaaagatgttaaaacccgagtacctatctcaaacaaccagtaatctgccattgctatctgccctattgaagaatagcaagaaaactactagtgaaggccagaattcaaaccctgatccattgaacatagagaaaaacatcattaaacaaagcatcaaggacaaactagagcagctgcgcagttcagaatccgttgcgcaagtacaaaagaaagaacgcaatcccccttcatttgaggccaaagtctgtgcggaagaaccgatattacggaaaaacgccgaagggttgctcccctcatacgttcctgttcctgctactcctttggaagatccagaaaatcatggggtgcgaaaggtcgaggacaaaggacttagagtcgtctccggcggctccactcagtgtctaagcaccgaagtgaacgaattgcctaaggatctgaatctagacaatttacctacggataataacgggttcgttcaatatggtctcaaaggcaataacaacaacaacagatatagctttatctcgtctacgtcgacggactatgagcccgaatggtgtgacggacaacaacatatttcaatgcaaatggcctctatggccaatgcagaggaggcaaatagtcgtgaaaaatcgaatttagacataaagatcaagcagctagaacttgaaattacagaattaaagttgcagaatgaaaaattagtgcattccatgacgacgaacagatacattgaagaaagatttatgcttgaggttatgaaggatcctagtatacaggctcaaagatcccaaagagatattgagagaaaagtcaagcaactggagaaaaaattcttcaattgtaaaaaagttcttaagaaattgactgaatcctccgcagtagtggccacctccacttcaaaaactgaaggaaattcagcaagaatcccatgccctaagactagactggcacgcgtttctgttttagacctaaagaaaattgaagaacagccagattcttcttcgggaacttcgtccgaggaagatcatctaacaaacgatgatacggatgctaatactagcgaagatttaaatgttgcttttgaagaggagccaacttctgctatttccacaacagcatctgtgcagagtggggaaagtaaaagaggtttccaacttaaccttcctgtccaagtggagaagaaggaaaaatgaagcgtcaacttcaaattaaattaacttattttacacaaacattcacaatacatcaatgctgataggcgctttgtattgtaggctatcgagttacgcatctgcaatgtgcgtgatttctccgttatccatccttctcattggacaatttttatttgaatattactgaacttcaaagggcttgtcgtgtgatttaatcttttttcttacaacgtcgaatgctgcagctatttattcatagtgtcgtctaagcaaataccccgcttttaaaagctgaatagaaaatccaatcacggtgtgactggtatcacaaacacataatttatatattgcattcaagtttattcaacctatacttaaatacattaattaccaaaaaaaatgatataataaagtcttcttttatctgattaatgacacctttttcagcgggccaaattttttttatttccgaagcccgccggactaatattaattatatcagatagttggtgagcaaacgcatgtggaaatgaacaacaatttcgaaagtgcatatactatctataaatatcaaggggattctatactataacaatacctgcgatgtcatccacagcagtaccacgacctaaaccttgggagaccagtgcttcgttagaggagccacagcgtaatgctcagtctttaagtgcgatgatgacctcgaatcagcaggattccaggccaactgaagaaagcaataacagtaatagtgcaagtgagtctgctcccgaagttttgccgcggcctgcggcacttaactcctctggtacctacggcgaatcgaatacaataccgggaatatacggtaatagcaattatgggataccctatgataataatccgtatagtatgaactctatatacggaaacagcatagggaggtatggctatggaggatcgtactatggcaacaattatggatcgttttatggaggagggtacggtgcaggagcgggatatggaatgaataatggaagtggactaggtgagtcgacgaaggccacctttcagttaatagaaagtttgataggcgctgttactggatttgcacaaatgctggaatctacttatatggccacacacaactcgtttttcaccatgatatccgtcgcagaacagtttggtaatttgaaggaaatgctaggttcattttttggtatctttgctataatgaagtttcttaaaaaaatactctatcgtgctactaaggggagactaggaataccaccaaagaatttcgcagaatctgaaggaagcaaaaataaactaattgaagattttcaaaagtttaatgatagtggtaccataaattctaatgagaaagccacaagaaggaaaatttcatggaaaccgctactattttttttgatggcagtatttggttttccatatctactaaacaaatttattactaaactacagacctctggaaccatacgagcatcgcaaggaaatggtagcgagcctattgatccttcgaagttagaatttgcaagagcgttatatgattttgttccagaaaacccagagatggaagttgctttaaaaaagggcgacttgatggcaattttgagtaagaaagaccctcttgggagggattctgactggtggaaagtgaggacaaagaacggcaatattggctacattccgtataactatattgagatcataaaaagacggaagaaaattgagcatgttgatgatgaaacgcgtacacactagtgcatcaatatttgcacacatatattcgcatatatatatagtaaaatctaaagtaatgtaaatattccagggagaatcagcagaaacgagacgaagtacttcttaacaaaaagccagataacggtgcaaaaacacattatattctccatcttgaaaacacaatctcctacgtacacatatgcgtatttatttttatatgaatgaaacgcctatggatatatatatgggaatatagacattcacaatttcaggacaattgtgatatggcaatatccaaggcctgcggtgctgggcttcgctttttttcaccaacaaaatgagatggacaagtttatcatagcaaagaaacaataagcagattacataaagtcgtcatcaccgaattcaaaatcgtcggggccatctaggtcgaaatcttgatctttcttaaatgcgccacccaaattggtcttacctttgactttcttcttaccagcacccccagtagcagtaccacctctaacacgggccagacgagcttgcctctcctctctttccttatctttgatcaaaacgttcaaagtagcaactgtttgtcttatagattcgatggacattggttttgctacatctctaatcaaatcaatcgctaacgatgaggagtagttcagcggagattttttgttcattggtgtaatagcagcagtaagagcctttcttaaatcctggtactctctctttgtttcggcgttaaacaaaggatgtgtttcgataggtgtgtccttggtaaaggcgggtctttttagagcttgttcctcttgttccttttgtaaagcacgagcccttggatgttcttcggcaacacctaaacccgcaaacaaatctgcagcattgtttaagtcagactccatttcagcctttttgattaattctttacgtgtcttttcatccaatgtgtcaatatccaatagggctctgtcagcggaggattctttcccttttttaaccttttttggttgttctttttttggctttggggcaggcttcttttcttcctcttctgcatcccatgattgcatgacaggttcgtcatcaccaatttcagcatcccatgagtccatcaaaacggcgtcatcattacccatagaaccattgatagcttcgtcgtcccaagacatttttattacttttttttttttgaggtggtggttaggatagaatagttacaaggaactcaaaagatagtaagataatttaaagcgagagttcaagaatggtgggagcagtcagttctcaattctttaatgtagtacttctgacttagctagcatgaaaaaaaaattcggaaaatgcccaaaaacaggtgtgttcgtctaatatgatacagggacgaccataatatcaagattagtgacatttgatgtatagtttagcagaatgactgttataaataaataattatatatgtgtgtatattaaattttgttgaaccagcgcttatttacaatttttaggacgtgaccaaatgcgagctgcactagttttctcaatttcgctcgcccatggtgatatctttaaagatctttaaatgggaacatcaaaactgaggatttctcgcctcttcgagtttttggataacaaatgccatgcccattctgcttttcttaacgttttcgtcaaatttagtgcgcgaccaatcctctaccttagatttgatacccatattgaagccacttgaaaacttcacccggctgtctgctatcgtactacttgtagcactgtcaaattgataggtagtatattcttcaaccttcatgattccagtgtgatccagattcctagtgtaagttttcattgtggagttagcggggttcactacggaaacttcgattatccatgtttctgttatacctcttaaaaagggtttgacccatgtgggcagctttccggactttttcaacagcctcgttgtgcgcaaatttccttcttgatcaacgttccttgatattgtgtctatggatagtacatggggggagtatggattggggtatctattaaaaaaggcgcgtgaaacagaggcaaaatcggtaggaaatatatgtgtgcttttgtgtaaaaggaccattgcaactcttaaggatatcttaccgccgtctcagaagccagacaatacttattgaatatgattactcatccatctgtcatatatattttttttttctagcttattatccagggagagcgagaaatactgcggagtttttcacccgaaagaaaaaaaatacgcaagcacgatgataacaatagttatattattggttacctacagtgtataaaaagaaagagttttattaaaatgcagaactatgtggtggtatacagaactgattatacattctataacaaaagggcaccaacggcgaatgcacccgcaccataagctatgtgagtgccggcaaaggcgccattggtagaattggacattacggacgctaccttaccgttgactgtagacttgtatgtagtggtcagtgtctctactgtagaacctgacgtagtggtataagttgatttgatagtgcttactaccttggtgcttgattccggttttgatgaggatcccgaagatgatttacttgatgaagccgtgttgtcagttgtggctgaggacggtagccaccaaacagtagatgtgtaagtctcacctaacgaattcgtggtagttactatagtaactggcccgtccgttgatgttgatgtcgttgaggaggatgcggagttggtgattccgcttgacgtctctccggtgggctgcacagaggcagttgaagttgtgcttacggcagagttgctttcggccacccaccataggtactgtgtcgtggttttgccttgtgcatccgtcgtcactacggtggtacttggagccacagcataggtgttgctgacgacgttgctagtttgtactaagctttttccggtagaaactacagttgatgcgctttcttgggcttcctttgtcgtggtaggtgtgatctcttgagagtttgagctttccttttgtgagctatcttcagagttctggccatctaaggaaccagagtctttttgagcagcggctagagtaattaaggtggtaaataatatggaacaggccttcattttatatatatgttgggtttgtttatattttcactagatcggtgagtatctagtccagaagagttgatctttcttacatacttatatatgctcactaccgccttctgagaaagtaggcgtttttcagctacctcagtcgctaaaaataaatgcgagttctcaagccaacttggactccaaggcggtaattatagtgattctctttgtctatttttggatttattttggaggctgacactctaaagccagccattggattaattattttttcacttcgtcaattgactatgcggaaaaactaaatgtggtcaaattctgtcggctatgtacacgaaaactatatacgcctcgtcctttcagccactacaacataacaacaccgacattgctacgccttttaatgtcgttactattgtcgggattcaagccaccggtaatcggctttgctctataattaaataaatagaagttcaagaacccgtcaccgggcccgaacttcaaatcatccaagaacaatgtattatcttgcgaagtcaacgcgttaaaaacatccatattagcgtttttggccaaaatacaagcgtcataaatcaattcacacaatcttgttttcaaagccttagtagcttttggatcaaacctgtctttgaattggaaatctgcatcggtggcataataatacaagtacccgatgcctaggtccttatattttgtgttatttaggattgtgaatggcaatgagtaaaatgagaagaagtctgtaatttttccatcgggctgttcgactacatatgagaaaattacttgtttatccaatggtaacgattcttcaccaatgaaattatgttcgaattcttcttttgtgaaaatttgaattagttcgaacctggattgatatcttttgaacaactcaaaaacttggtcaatatcttccttctttaattttctcaatcccgctgtctttgttttggccggtaacgcattctcagcaatcatatcctcctctgtgtgcccatctggtaaccctgtgaaatctacttcataaagtttcttccaattcaagggacgatgagtataacgacacgtactcacaggtgctggcaaaacaatacctgccgtgtacaatgcatgccagatgtcacatttgttcactcgtctcgtaatttctttaattagaacaggtgttaatctcttcgatcttagctgtttgtgaacgcacaagaaattgatttctacactaggcacttgtttacctctaacaccaagtgttactggtatggctgagataaaggcaactaatttctgtgtttctttaacgcgaacaccaatatgccaatccttcttccaacctggactctttaaagcccaattgaagaattctttggtatagttaaatctgaagcctgcatcgcggtcttccacgtagttttcatttagtagaacgaaaacatcttcaagctgttttttgttgtccacatcaatactacaccattcgaagctagacaataaaggtagtggcttgtcagatatatcttccggtgtctttggcttatcaatggggccttcttccaccaccttttcatcgaaatctttgaccggttgcgttctccagaatttgtggtctttcatagcttttttctgttcttgagtgaattttgaagtatcgtcattattcaactgtaataacttcaataaattctctaattttttcgctttatcctcttctgacattctataaatacgtttactaccgaagctctatgacaaccagagctattgtacagatcattctctaaaaagcgtgcaacacatatcatcttcaattatagtgaattacttttatcatgagcaacggctgaaattattttatcctattgttttatgacagtatcctttcaaaagagtcgaaaggatcctctgttgcaagaactactattacgtaattatacatagtccgcctgcaatttctagtgagactttgctttgctttccactttgcgattaatattgagaattttaaacgttaactgaattcttacccacccataataagaactctaactggcgaatttatcatgaaacaaatctgcaagaataaaaaattagagaatcgtgcaattcaatttaattgccttgtccgttgtaaaacttttccataggccctaccttgagttgatcatatgtattattctatatatattatatccagtcgggtaataaattttctcgccctcgaaaaaaagaagtgaaaaatttgtctcgatgagctgagatgagtttgaaagaagcaaagagttttaatttgtaaacgatagcaagtgtaccctcagttgagtctattacgccttccttatttggaaacttagaagacgaataaaaaaaacaaaataactaatgatttctgctactaattgggttccaagagggttttcctcggaatttcctgaaaagtatgttctggatgatgaggaagtggaaagaattaaccaattagcacagttgaatttggatgatgctaaagctactttggaagaagcagaaggcgaatcaggtgttgaagatgacgccgcaacaggtagttctaataagttgaaggatcagttggatatagatgatgatttgaaagaatataacctggaagaatatgacgatgaggaaattgcagataatgagggtggtaaagacgtttccatgttcccgggtttaagtaatgatagcgatgttaaattccatgagggtgaaaaaggtgaagatccatatatttcattgcctaatcaagaggatagtcaagaggagaagcaggagttacaagtttacccatccgataatttagttcttgctgcgagaacagaagatgacgtttcgtatttggatatctacgtttacgatgacggtgctgggttccacagtagcgatattcccgttgaagaaggtgatgaagctgacccagatgttgctcgtggattggttcgtgaccctgcactttacgttcaccatgatttaatgttgcctgcttttccactatgtgttgagtggcttgactacaaggttggatccaattccgaagaagcagccaattatgctgccattggtacgtttgatccacaaattgaaatttggaacttggactgtgttgacaaggcctttcccgatatgattctgggtgaacctcttgataattcaatggtgtctttgaaaagcaaaaagaagaagaagaagtctaagactggacacattactactcatcataccgatgctgttttatccatggcacacaacaaatatttccgttccgttttagcatccacctctgcagatcataccgtaaaactatgggatttgaactcaggtaacgcagcccgctccttagcttccattcattcaaacaaaaatgtttcatcatctgaatggcacatgttgaatggttccattcttttgaccggtggttatgattctcgagtagctttaacagatgttagaatttctgacgaaagtcaaatgagtaaatactggtctgccatggcaggtgaggaaatagaaactgttacatttgccagtgaaaatataatattatgtggtactgattctggtaatgtgtattctttcgatattagaaacaatgaaaaccgtaaaccagtttggacattgaaggcacacgatgctggtatctccacattatgttcaaacaaattcatccctggtatgatgagtacaggggccatgggtgaaaagactgtcaaattatggaaattccccttggatgatgctacgaacactaagggcccaagcatggttctgtctcgtgatttcgatgtcggaaatgtattgacatcgtcattcgctccagacatcgaggtagcgggtaccatggtcattggtggtgtcaataaagttttgaaactatgggacgtttttaccaatagatctgtacgtaagagctttaaaagtgaactagagaatgttcaagcaagagcaaaagaagaagcccaaaaaataggaaaaagttcaagaatcgccagaaaatacaccagtaacgataacccagatactgttataaccattgatgatcaaggtgaagatgaagaagaaagagaaggtggagatgagcatgatgacatggcataatctggatatgaaaaatattaaagcagagtacattgcaagtacaaataaaaaatctatagaagataatactgtatactagtgtaagaggagcctcagaaaaaaacaatataatacattaatatgtgctgttacggtataatttagcatatgatgacaatgtggtgaattacagttgtgtaacttttttatatcacccggcatatatacgctcgtagaatgcgatgtgaaaattttctttttttttttttttcaaagtgaaatttttttgagtgatgagatgggaaatgaaaaattttgtgcaattgcgtagtgtctacagttttttaagtagttattaaaagtgttttggaaggtatatttctaggagaagaagcgtgcagaacagtatttagtgaaagatggctcctattgaatacctactgtttgaagaacctactggttacgcagttttcaaggttaagttgcaacaagatgacattggttcaagattaaaagaagttcaagagcaaatcaatgattttggtgcttttacaaagttaatcgaacttgtatctttcgcgccattcaaaggtgctgctgaagcccttgaaaatgctaacgacatatcagaaggtttagtctctgagagtttgaaagctatcttggatttaaacttaccaaaggcttcctcgaaaaagaagaacattactttggctatttccgataaaaacttaggtccttctattaaggaagaatttccatatgttgattgtatttcaaatgaacttgctcaggatttgattcgtggtgtcagattacatggcgaaaaattattcaaaggtctacaatctggtgacttagaaagagcccaattaggtttaggtcacgcttactccagagctaaagtgaagttctctgttcaaaagaacgacaatcacatcattcaagctattgctttattagatcaattagataaagatatcaacacttttgctatgagagttaaagagtggtatggctggcatttccccgaactggctaaattggtaccagacaactacacttttgccaagttggttctttttatcaaggacaaagcttcattaaacgatgactccttacatgatttggctgctcttttgaatgaggattcgggaattgcacaaagagtcattgacaatgcccgtatctccatgggacaagatatatcagaaaccgatatggaaaatgtttgtgttttcgctcagagagtcgcttccttagctgattacagaagacaattatacgattacttatgcgaaaaaatgcacactgttgcaccaaacttatcagaattgattggtgaagtgattggtgctagattaatttctcacgcaggttccctaactaatttatctaagcaagcagcttcaacggttcaaattcttggtgctgaaaaggctttgttcagagctttaaaaactaaaggtaacactccaaaatacggtttgatttaccacagtggttttatttctaaggcctctgccaagaacaagggtcgtatttctagatacttggctaacaaatgttctatggcctctagaattgacaattactctgaggaaccatctaatgtttttggttccgtactaaagaaacaagttgagcaaagattagaattctacaacactggtaagccaactttgaagaatgaattagccattcaagaagccatggaactttataacaaagataaaccagctgcagaagtggaagaaaccaaggaaaaggaatcctcaaagaagagaaaattagaagatgatgatgaagaaaagaaggaaaagaaagagaaaaaatcgaagaaggaaaagaaagaaaagaaggaaaagaaggacaaaaaggaaaagaaagataaaaaggaaaagaaggataaaaagaagaaaagtaaggattaaaaggaacaatgaatcgaaataaagtatatcccatctttttgtgtacttttcttccctttaaagtttttcatatatatatatattatcttttattcccttctaatattcttctttaggatttggaagctgtatattgtatatttagaaatattattaaataaaaaagtcatatgttattttgagcttaagtaccctcttatgcctctttcactcgccattactgacattctgtgatcgccattcatatatataggcctgattgtgcaccaattgccgcgctatcacacctccataagcgatagcattcttcagaatatcttgaaggctcaaaaccaagccattgaccgcacaaatcaactaaagaacccatgtcagacaacgaaagtttctcaaatccattaggcccctcactaggcgctacaagacatttaaatttcagtcccttactgggaccgacaatcaattgtgttagcacacttcctatgaatcccgttataaattctggtggttgtagtgtacattcattttccgtcattaccttcatgctggcgattttatcagaggtgccaattactattatatcaggggagaactgggctaactgtgatatgatagatctacttatcatgttaccaaaaatcggcgatatactaatgaaattctcctccatagaaaataataacgtctttccaaatgaataaatcgggaaagaaaaaccatatactgtttcatcggcggtgtcatttttttgatcaggatcaacctcgtttggaaagttttcgtcgtaattccacgagtgtttacctgaagattggggaagacttggacttttcaccgtcaatgtagttttaatttcaccaatagaggttaattgaagcagatttttggggaataatgggttcattatcttagtagtaatgacggctgtcgaatattgaggaacatccaagtcctgaggaaactcaacttttggaaccgggcagacttctaaagattgcaggttttttgaaatctctgggagatctagcagatgttttggttctggtaagtcattccattgtttaaacttcaaaaagaatcaagtaacataagttagtcaaaccactctactctagcaaaatatgatggggaaaaaagattattgtaacatacaagcatcgctataaatgaaaattttactgtagtgcgatgatatcttggtcgctgtttcttattatttcgcctgttgccacctattgccacgcaacttcttaaattgatttcaatgaagtctgaaattttgatgcgaaagaaaaaaaaaagtaaaggcaataaaacttcatcaagtcaaacgtcatctataaataatcccacttcagaattgaaaaagactacatttgagtggaggaacaaaagcaaaaatgtctgaattaggtgccaaatatcaacagttgcaaaatgagttagaagagtttattgtggccagacaaaaattagagacacaattacaagaaaacaagattgtaaatgaagagtttgaccaattagaagaagatacacctgtgtacaaattgacaggcaatgtccttttaccagttgaacaaagtgaggcacgtaccaacgtggacaaaagattagagttcatcgaaacagaaattacaagatgcgaaaagaacataagggacaagcaggaagaactagaaaagatgagaagcgagctaattaaactgaacaatacagcagcttccactggcccaggaaggtaaaacaaactcacaggtcctcggaaagacaagaaagcgcacagtaccaataaatctgcccaaaataaaattttcttttatatacaattatgtaacttacaaacaaaatacctacgcatttcactgtcctaaacttcaaattgacatgtaagattgcttaacccctaactaattgagatttgattaaatttaccgtagacattaacgtataccaggcaaactcttcagtattgttatagtactcacccaaacgcatgaccctatgtaatttatcctttgcaaaagtaaacgtttctttgtaattgtgggatttatcctgagccataaataactttgaaccaatgtaggtgctcgaaacagccaatctcttagcataccatgcagaatcatggtggtccttttcgttggaaaagtaaatcatatcatcggacaatctgtgtagttcaggaattgcagtttcaaagagaaaggcgcttggaatagccaattgtgacattagttccgacaaatgcccaccgattggcttgtccatctccaatctttttaacagcaaatgttctaatgagggtagtttgtattgtggagttacgtcagggttgattccttcagttaaacgataccttttatctaccaattgaaactttatcagttccatgacagcggtggaagaatggaaaaacgagggcgagttgggagcacctattgaagagatcatggaggaaggatagccgagctcatttaaagattcaacaatggatctttcagagaaaccgtgctcgggaacaaacttttgtagagctagtgacaatactttatactggggtgattcttttccataagttaaaggtttaatatgaattggtttaacatgttcgatagggttcgaatgatataaacgaaagaatttacagcccgttctggcagtattgcgacaaagcatgatttataatgtggtaaagactctgttatctctttccaaattggggtgaagtaccttatgtaggcccaaaaaaaaaaaaaccccgtattattgtttcttactattgttattgctatttttcttccgcctaatatagtccgaaaaggaaaggatatgtcatggcaactgtagtcagtatactactgtataggtgaatggattagttaatggactattaggtcaaccattacgaagggggtggggttagtatttttgtatttacagatattgagatatcatacataagaaaaaaattataataacggtagaaaacgcatatatttataagatgaaagttgggcatggcctcccgataatcattgtctcttgattgtatggtaccttttacctctgaacccggcaatatacatgttaaattgataaacttcttgaggattcatgtcatttaattcccacttcgtacttccaaatacgtttctgacgggctccattaagacatccatttccttaccgtatttggatttgacaagatttatgtcgtccgttaggtctttcttattgaaacccgttgtgaagatagcacattttgtttccagtaatgccttcatagtttcacccatccatgaaccgtgagattctggagatgcgtagcctggatggaaagtaaaaaagacatccatgtatggatcgtatgggaaaaaatcttgagcctcatggaatacttcgaaaaagtttgtacgataaatgaatttcagagtctcgtctactctttgtactaccggcgtagtagacttgacgtactcctgtttatcccttttatacaggcattcgggtccaatgaaatgtatttcgaaactctgctctgggaaaagaaactggagctgtttccaaacgtggcccggcaattgagcttcagcacgtgcacctaggatgaaaattctcatagcacggttcttagttgtggttggtaaagatctattctccaacggatataaagtatacctgagagcagccagagattttagaccttctaaggtgataggcccctttgggttcaatgaatacggggaaaatttgtgcagcaaagacccaatcgtaattggatagcttagcatctttgtgactgcggctaattggaactctgtatccatggaatagaatgatcttgtgtagaaaaacaaatcccagtttgttaggttaacggccttgtcgtagccttgctgttggggaaaatcaaactccgggaagggtctaccgcttcttaagtcatgctcataaatattaacttttttcaggatttcatattttttagaatcgtgatatgctttatccatctcccaagcctctcgtgagtgatgagtcggaattcctgacagaggacaagtgtagttaatatctttgccggtaacagggcagtgtgctagcgttctaatcttggcggccctttcacgcaagtccactgagggagactgatcccatggatggaatctgttctccggagtaggatcttctggagagggaggaggatccaatccaagggcgttcctaacgaaccccatgaggtgacgacgtgtttggtgagagacaactagcctgttgtgtggcgacttccttagcagatggaaatatagctgagtagcacccgaaggagcatatagcacggtcatagttctggaagtacaagtttgccaaactactttaagtccaccttcgcaatatctacagtgttctgcgcttataaagtgtaaaaaaactacaaccaaaggcccgcccttagtagttgaccaaatatctactattgtctcttgtcagactcctttggattattttcttcgagccgctttttcgtagcgcatgataaaaagagccctttccccatactgcacacttaagtgaatgccaaatataatatcaagagcgaaaggcggttgagttccagccaagacgagcacacacgacaccagaacgagataaacatgctaggaagggcattgcgacctgggtggctgggcattactaggacggtggttaagaaaccaagttgcgggtcctactttaacagaacctttcaaacagcaattaacactacaatgcctcccatgcaagagggcatgctgagtacaatgatgatgatgacggctacggcaacaaggatcactggcacagtcagtgagccattaaacggttcaaatatagtgatgcaactcgattcagtgatgagaaagaggaaaaaaaagatgaagaaacacaaactgcggaaaagaagaaagagggagaaggcagaaagaagaaagctatctcagggtagataatagggctgtaaaaacctctcacatgtttttctctgctgtttttccttccctattcttcatattttgatattatttcatgtatatattatgtttgtatttagacttttttttttatacgttatactatgctaagaaaactctttaccaagaagtaaagaacccagatcgcgataatagaaagcaccagcagcatgaccgtgtggagtgctcttctagtagcagaatccttgttgaacatccattcttcgtacaagtacgtaatacacttgaagctgaacttgcccattaactcgcgacgattcaactctccaatttctgcaacgatgttgaagttccaatcaaaaatgccttctgcgacgctaatgatctgcaacttttgtgcttcggtcaattccgtcctggtggccagctcatagttcttcttgtattcccatttcaagcgtgtttcttcagtgggacccagatcgctgaaggtgaagaagtttgtgccctttttgaccagttccttctgtgatagcttctcgaagttggggaagagccccagtcttctgtacaaattcgatcgtattagcttgccgccggcgaaaagcgccaagtacagaacgtgacagtaagaaagaatggtgcatggctccttgtgtatgttttcgtggatgttattgataaactgctgtagtagcggtggcttctggaacgtagccaggaattcgtttaatgattctgtgcttttaaacgtgtttgagtatagcagcttcaggtccttatagatctgcgtagatcttctaaaatcttcgagccaaaactgcttcagaatggtcgaagtttgcagctcctcctccgttacggggtcattcagtaggcgatctatctcttgctcgatggcatcgaacacataatagtacgccagaataccctgtctgtatataaagccatgtctcatgcgatggccatctttatgcccatgaaggtattgattttattgtgggcatctctggtttgaaagttgattctgtttgctagcgccccacgtcagtgggtgagggtatgattgtattgctactgtcctccatttttgcggttattttatgtgtgtgtgtgtatatatgctgtgttatattgtgcactgttaaatagctcctccttagactaagcaagagagtatgaggaggttgctcttatatacaaacacaagagggcgagaggggcacctggccattgctccatcacacccaactcaggtgtaaatcgtcctacttatgaaggtcattagcccatgtttgaaaccgtgtgttacatggctcaaattccacggtccgataacgccgaccccgagcaggtgcaaatggccaggcggtatcgccaatgatccgtttatctaaagatagatagatggccgaacgtggactgcctctatgggtacaataacatatgcacatggcaacgggtcttggtgctcaatcgacgggcacatacaccctgactttccccatcatacgacgatgctctagtaaacttgcacccgcacctgttagataaacaagtgcgcccaagatcacaataccgaaggggcgatatcaccactcagtattctacagtcgagcatagcgtagtctggcagtatcccgcacgatccattgtattgtttgtccaaaccgcattttatgtgtaacgattaatcgtatatacatggcctacaagaaattaccctgcggcgaagggtgaaaaaaaaagtagtggaaactaaagaaagaagagtttagttacggaccctttcaaggattgacacactcccaatattttgctacattattgacctttgttgaaggaggcgttcgtttatttaattattttgttctgttttgcctacaactgcgaatacgctcacattctagtttgaccttcacaaattcttatcatcttcttttgtttattttgacacacccctattaagtgtatttgttttgtaagtaatgtctaagcagtttgttcgttctgcaaagaacatgatgaagggctactcatccacacaagtgcttgtgagagatgccacggcgaacgactcgaggactccatcgatagacactctcgacgatttggcacagagatcttacgattcggtggacttcttcgagattatggatatgttagacaagaggctgaacgataagggcaaatactggagacacgttgccaaatcgctgaccgttttggactatcttgttcgtttcgggagtgagaactgtgtgctatggtgcagagagaatttttacgtaattaagacattaagggaattcagacacgaaaatgagtccggatttgacgagggacaaattatcagagtaaaggctaaagaactcgtctctttgttgaatgatgaagaaaggctacgcgaagagaggtctatgaatacaagaaacagaagggcgaacagagctgctaggccaaggccaagaagacaaagaacaaggagcaacccacacgattcttctccctcttaccaggacgatttggaaaaggccctagaggagagcagaattactgctcaagaagatgaacaacgtagaagagaactggcccagtacgacgatgaagatcctgacttccaagctgccttacaactaagtaaagaagaagaggagttgaagcaattgcaggaactacagagattacagaagcaacaacagtctctgtctcaatttcaagctcctttacaacaacaacaaccacaacaacaaccagcgtactacgacattttcggtaatccaatctcccaagatgaatacttacagtatcagtaccaacaggaccaggaacaagcaatggctcagcaaagatggctggaccagcagcaagaacaacagcagcttgctgaacaacaatattttcagcagcaacaacaagctgcggccgccgcttctgccttgcaacagcaacaaacagccgctaatatgcaacaacaacaacaacagcccgctgattttcaacaacctttgcctacaggttctaataatccgttttccatggataatcttgaaagacaaaagcaggagcaacagcatgctcaattgcaaagacaacaagaagaagctagacaacaacaagaacaattgaagctacaacaattgcaaagacaacaacaagaggaagctcaattacaccagaagaggcaagaagaagcccaattacaacagcagcaagcccaattgctacaacagcaagcccagttccagcaacaacaacccttgaagcaaacaaggactgggaaccagtctatatcggataaatacagcgacttgaataccttgttagcaactggtacagggatagatacttttggtaacactggagaggcacgtattcctgcacaacatacaaagacaggcacatttataaattctcagggtacaggctacaaacaggttactaatgaacccaagaacaaccctttcttaagcaaccaatacactggtttaccaagcacaaatatcgtgcccacgcaaacagggtacgggtttggtaaccaacctcaaagtcctcctactaattctcctcagcaaaatcctactggtataagctactctcagccacaacagcaacaacagccacagcaacaaccgcaatacatgcaaaatttccaacaacagcaacctcaatacgcccaaaacttccaacaacaaccacaatacactcaaaattatcaacaacaaccacaatacattcaacctcatcaacaacaacagcagcagcagcagcagcaacagcagcaacagggatatactcctgaccaaggtgtaagcttaattgatctttgatactgtcctatatatacttttttgtcatgggtacacatacatgtacgacatatatatatatatatatatatatattagcgagtttacattgatgtagagcagtaactggaagaaataaaaatttaaacttaatactagggggtccgtcttctcgtgggtacttcttttacagttttcaacttctgctgacttgtatgccttcttggcgcttcttcggaaaagttgacagcgggctttactttaacggcaaatcgcagtaagtaagcaagtaacgaactcgcacttcagcaaaataaaaaagaacaatcgattagaaattcaaatttcaccgtgactctttaacccctgccgaatattataagcaaactatgataacactcttattatacctgtgcgtaatatgtaacgcaatagtgttaataagggctgattcgatagcggacccttggcctgaagcgcgacatctactaaataccatagctaagtccagagacccaatgaaagaagctgctatggaacccaatgcagatgaatttgttggattctatgtaccgatggattattccccacgtaatgaggaaaaaaactaccagagcatttggcaaaacgaaatcacagattctcaacgtcatatttatgaattacttgtacaatcaagtgaacaattcaacaactcagaagcaacatatacacttagccagattcacctttggagtcaatataatttcccgcataatatgactttggcacacaaatacttagaaaaattcaatgatctaacccacttcaccaatcattcggccatcttcgacttagctgtgatgtatgccactgggggatgtgcttctggtaatgatcaaaccgtgatccctcaggattctgctaaagcactgctatattaccaaagggctgcccaactagggaatttaaaggctaagcaagtgctagcttataaatactattctggcttcaatgtcccacgaaattttcataaatctttagtattgtacagggacattgctgaacagctgagaaagtcgtactccagggacgaatgggatattgtcttcccctattgggaaagttacaacgtgagaatatcggattttgagagtggcctattaggtaaaggtttgaattccgttccatcttctacagtaaggaaaagaactacgagaccagatattggttcaccctttattgcgcaagttaacggtgtacagatgaccttgcaaatcgaaccgatgggtaggttcgctttcaacggtaacgatggcaacataaatggcgacgaagatgacgaggatgccagtgaaagacgaatcattcggatatattatgcagctttgaatgattataaaggaacatattcacaaagcagaaattgtgagcgcgccaaaaacttgttggaattaacgtacaaggaatttcagcctcatgtcgacaatttggatcctttgcaagtattttactacgtccgttgcttacaattattggggcacatgtatttcaccggcgaaggctcctcgaagcctaatattcatatggccgaagagatcctgaccacgtcgctagaaataagcagaagggcacagggacctataggtagagcgtgcatagatctgggcttaataaatcaatacatcacaaacaatatttctcaagcaatttcgtattatatgaaagctatgaaaacacaagctaacaatggaatcgtagaattccaattatccaaattggccacttcattccctgaagaaaaaatcggcgacccatttaacttaatggaaactgcctacttgaatggattcattccagccatatatgagtttgcagtaatgatcgaatctggaatgaacagtaagagtagtgtggaaaacactgcttacctgttcaaaacattcgttgacaaaaacgaagctattatggcacctaaactgaggacagcatttgccgcattaatcaacgatcgttcagaagtggctttatgggcttattcccaactagccgagcaaggctacgagactgctcaagtctctgccgcctacttaatgtaccagttgccatatgagtttgaggatcctccaagaaccacagatcagagaaaaactttggcaatttcctactatacaagagcgtttaaacagggaaatatagatgctggtgttgtcgcgggagatatctattttcagatgcagaattacagtaaagctatggctctttatcagggtgcagctttgaagtactctatacaggctatctggaacttagggtacatgcatgagcatgggctaggtgtaaacagagatttccatcttgctaaacgttactacgaccaagtttcagaacacgatcatagattttacttggcttccaaattgagtgttttaaaattacacctaaagtcatggttgacttggatcaccagagaaaaagtaaactactggaaaccttcctcgccacttaaccctaacgaagatactcagcactcgaagacttcatggtacaagcaattgacgaagattctacaaagaatgagacataaggaggatagtgacaaagctgcggaagattctcacaaacacagaactgtagtgcagaatggagctaaccataggggtgacgaccaagaggaggcttccgagattttgggcttccaaatggaggatcttgttacgatgggatgtatcttggggatattcctattaagtatattaatgagtacactggcggcccgtagaggctggaatgtccgtttcaatggagcacaattaaatgcaaatggtaaccggcagcaagagcaacaacaacaacaacaagcacaaggtcccccgggctgggacttcaatgttcagatattcgccatatgatgtggtttgtatagatatatacatagactatccatagaaatcacccacgcattacccgaaagttttcaataaagcgaacagcgagaagaaaaaaagcgaaaccgacagagaattaccaccctagagctttaaccccattgagatcaacacaatttcgaacagtgaaagtgcattggcgaaggtgatacaattggcttccagctctgaataataataacttacaagcgcaaagataacagataattttatatcagcatacaaatggtcgtcatagctaatgcgcacaacgaattaatccatgacgctgttctagactattatgggaagcgccttgcaacctgctcttctgacaagacaatcaagatctttgaagtcgaaggagaaacacacaagttaatagacacgttgactggccacgaaggcccagtttggcgtgttgattgggcacatcctaaattcggaaccattttggcatcgtgttcttatgatggtaaagtgttgatttggaaggaagaaaacggtagatggtctcaaattgccgttcatgctgtccactctgcttctgtcaactctgttcaatgggctcctcatgaatatggccccctactgctggttgcttcctctgatggtaaggtctccgtagtagagttcaaagaaaacggtactacttccccaataatcatcgatgctcatgccattggcgttaactctgcttcttgggctccagctaccatcgaagaagatggtgaacacaacggtactaaagaatctcgcaagtttgttactgggggtgctgacaatttggtaaagatttggaagtacaattcagatgcccaaacttatgttctggaaagcaccttagaaggtcacagcgattgggttagagacgtagcatggtcacctactgttcttctacgttcttatttggccagtgtttctcaagatcgcacctgtattatttggactcaagacaatgaacaaggcccatggaaaaaaactttattaaaagaagaaaaattcccagatgttttatggagagccagttggtctttgtcaggtaatgtactagctctttccggtggcgataataaagttactttatggaaggaaaatcttgagggtaaatgggaacccgctggtgaagttcatcagtgaagagtatcaagaatttaaaatgaaacatctcaaaagaaaaaagaatgcaaatgagtctatcgacgaatttgaagggaaataaacgcataatgtacagtaacgtataacaattaaagatttgtggaagttttcaaaaacttttcaacttttttctttgttttttttttgcaacttcttatattaatattgtcatagatatttcttatacaaaaacaagcgaacaaaaataatcgacgtatatacaatagatatataagactgtttttcttcaatagaacaggcgaaattattctaccggccgaaggtacatcttcccgctatgtaataaatagaggtatttaagttataacaattataattcccccattacggcagcaattaagttttgcacgtcattagaggcgattttaccattctccagtacttcagcgtgagtcgctttgcctttttctaagggtacaggtgattcgtccaacgcactggcagggctatccaccacgcaagtattggtaatcaaacttaaggccaaaaccctccatccgcaatgtcttgcaacaatgacttcgggaacagtactcattccgacagcatctcctcccaacatccttatcattttggattctgctcttgtttcgaaagtgggtccagatacaaaagtataagtaccttcatgcagtggcctttgaatcttgagctctttccatttcttaaataaaagcttcctcaactccagatcatatgcatcactcaaggctaaaaaacgaggtccatcttcatccaagttaggacctctcaatgggtgctggccagcaaggccagggatatttaaatgatcataaatgcacatcaaatcgcaggcttgatatttcgcgtttataccaccagcggcattagtgacaattaaattacgaacatgacccatgtggttaagcactctaataggaaaagtagtctcaaacaatgtgttgccttcatatccatgaagacgaccattcattaatactactggtgaaccattcatagatccgaacattagtgtaccggaatgacctggaaccgtacttttcttgaatcctgggatgtcttggtatgggactgttaccgggggtggattgtctctagacagcttggtagatattccaccaagccctgaaccacatataatcaaagttctcggaggctcgaaatttgttgtatttttgaaatgtggttctaaaatagcagaaatatacgcagcggccttggtaattgcttcacgttgttgacttacgttcaagatatcactcatcttttaagtttattcggagtttctcatgtgttctagaagattagcaagattatcctaaagttatgcctgccctatctgccctctgcttcgagattttccttttctttgcgctttgtaaacactgaaacaaaaacaaaaacaatggaaacatcagaaagatatttatttattgtggccgcataaagttttaattctttgataattaacgtcgtatttgggaaactgcttactataccggatactaggctgccctgatcaaacaaggaaattgacagatgatgcttgaagggtatacggtacaacctccacagtctactttgataggtgacattgaaattcaggacgaaaatgcaaaccaagaagttaagaacgtactttaccaaggagttcaaaagggtataaaaaggctagaaaaaagacaaaggagggttgcattaggtgatgtaacctctcaaaaggcaaacaaaatacacaatgctatacataataaattccatcagacgaagaacaattttgaaatagagaacatacgctcatcggccttggtaaaagaacaacaacgagacgtaaggcatgaagatagcgactattttttaattgatagttctgaaggctcttctactgatgacgaacaagttaatgaagatgctattgatgatttgttaagtcgaagagtaaatgatcagcagattcaagccgatgaagtgtatgaagatttcgatggagaaatgcaagatgtcattgaagaggatgttgatagtcaaattgaaccactatcaccaataaacaacgatgaaattcagactgagctggacagggcgtttgaaaaatattttcggtcggttcccaatccgctggatgatgatacccatgatgttgtgatggttgtggagtacgcttccgacatattctattacttgagagaacttgaagtgaaatataggcctaatccctactatatgcaaaatcaagtagagcttacatggccgttcagacgaactatgatagattggctagttcaactgcattttagatttcaacttttaccagaaacgctatacctgacgattaatatagtggatagatttctgtcaaagaagaccgttactttgaacaggtttcaattggttggtgtatcggctttatttattgctgccaagtttgaagagattaactgccccactttggatgatctagtttacatgctggaaaatacatacactagagatgacattattagagcggaacagtatatgatagatactctggaatttgaaataggttggccaggacccatgccatttttaagaaggataagtaaagcagatgactatgacttcgaaccaagaacattagcaaagtacttattggaaactacaatagtagaacccaaactagtggctgcggcaccaagctggttagctgctggcgcgtattttctgagcagaacaattcttggttcaaatgattggtctttaaaacatgtattctactctggctatacatccagccaaataattcctttagcatcactgatattggagaattgcaagaacgcatctcgacgccatcattcaatttggaaaaaatactttgaccaaaagcattaccgctgttctcaaattgtagaagaatggattgtttcgacagaagcctaacttactcatcttaacaccatttgcttcagttttggtttcggaaggatcatatttcatttattcaggtagaagatatatatcatattacacacacacacacacacacacatacacatatacacacatatatatatatatagatatatatatgaatgcatccttgattccgtttcagttaacaccccgatggtccacccaagtttatatcatcctctttttgaccgaatctttatttgacaatcttcaagcagcctcagggcaaaattcaattctggagggtttgatatatgtgccctatgcctccaggtaagcggcattcgcagtagaagagcagcaatcacatactccaactaagttaaaagacgatacttcgtatcttgaaaagaaattaccttattcgtctagtttttttgcttatcccttctttgcttcgcactttctactaagctgtcccagcgttctcttaatcgcccaatttcattagccaattttttattttctttcgtaatttcgtcaattttcataccatattctttaaattttttctgctcatataataccaactcctttttgaattgttccagtcttaagttaatcttcatttccgagtttttggaattttttcctccttctgttttcaattgaatatcattattcaaattaaattgtaagcggtttaaaattgacataagaagtggatcgtttatgggacttaaagtgtcctgatatgctgggttatcccaattcctagcattgcttattccatttatcggagatttgttgtttaaaataacagagccaataagcatattgttgttgaccattccaatattattttcttctgatgactgcttttcaatcaaaagttccaattcttggattttggctgtaatgtcctgttttaataggtcaatggcttgcgtaacgtcagaacttaatttattttgagacaaattctcgttctgcggacctaaaacttcaatggcttcttgatacttcgcttttgcatttgtaaaatctccttttcgacattcctgttcggcgtcctcaataatagtataaacctaattcatgttagtcaccatgaacaaaaaaaaagtgggggcataattcaaaaacttacttccgctaaagtactcattccatcaccaagattagtataactgtcgttgaattatcgaactaatccgtgcagcgatacagatgttttttatttcaaacagagcgttccattacgctgagttgaatcatctggtttttctaccctttaggaaattctaaagttgaagaggcgctatcgatgtatgcaatgatgaaaaagtggtacagagctttatacatattacaatacagtgcagaatttataaagggagataatacatttgaagcggttgttggtatagatatattgagagtactataataaaactattgggcggtggtaaaattcctgaacaaggaaggcatcattatactaatttatgatcaccgtcggcatccaggtcctcttccaactcgccaaccatattttcatcatcaacaagtacatcgtccaagtacgaatcttgttctgcagctacataatcctccatcaggctttgtactacttctcttgactcggcgaattcatcttgaacgttctgcattgattggaacaagtcgcctacattataattatttaaaaatgcgcccttggcaaatactttgtcaaaagtattgcacgcattctcaaagacgttcaccacggtagacatattgcttaacatcatgccgctaacttcgttttcatttggttgtaaaggcaagtatggcgatcttcttccaatgttaacgtgcatcgcagaagaggaccatgaggggaatttgatgcgttgttgtaatttggtcatagcacgcgatatctgacgaggttctacattaccaatgattgtattataaacgttaaaatatgttggattgttcatcgcggtagagacaagagaattggaagggtctaataaatctaacatgacgtcataactggaatggcctttatgcgctatatcatcgtgaatataatctgatgtaaatggagtgaaactagggcttaggaaatgaagttcaggagaaggaatcaaggtagagtaaatactggacatggatgaatacatgtaactcggaaaccgtatactgttcgttactgaagatattatggtcgatatcaattgattcgtgtgttgtaaatcgatgttcggatttctaaacactttaccggaaatattcagcaacgaagcgttatcaaacaccaccgttgcatcgctatcttctatcagtcttctcaaagccagaatagtgttataagattgaacaacaacctcagaagatcttgcagggaacacagaatatgtcgtgagtatttttttaggatatcgatcacacagcgcttctaagaggttggatccgagccctgaaccggtccctccggctactgagtgcagcaactggaaaccttcgaaattgtcggtagaatcaatctccttgtcgatcttgttaagaatatcatcctggttacgagttcctatatcatacccattggcccaagaattaccagcgctagcgccatcagaagctacccaggtatttcttgggtcgaaaaacccacgaaatgtgttctccacgtcggcgatgacactaggctcggaatccatcataatagcccttggcgtaaacttattcctactgttttcgcggaagaaaggctttgtgtcatcatctctttccgtactggaatcaggaagctgagatagcccatcggtgcctatagcgtgttctttcgccaattgagaccagagaaacttaccaacgtggttcccgcattgacctgcttgcaaagtaataatttctccacccatagatagttatatgttgaattcttatacatgtgactaaccgatattacgcatttgttcatttcgcagctactgttacgattattatttattacatttaatgaaatttcccaaaagataatattaacgcgttctgttacccggtgatattttctgaatgtcagggtaacaaagagagaacgttataatgggagaatagtaaatatttgctttaggaaattagtaataattgcaatgcggaaaataggtgcattttgtgtttcttgaaaggtttgaactaaagaatgtatacatatatattagagcgtgccttcatgcagggaattagaggatccgttacggaagagagaacttcgtaagacattattgctgtgactattttgaccgtttccaagaactcaaccagtcatttatctttggagtaacaaagcagtcccatttgagagacccctcatcatgatgattcagtctgtcttgcctgttatacgaaacgactactcttgacaaatctttttgggaaaaggttggtgcctttttctttgcctttatacaaaactgcacttgttctgtgaatttattttggtacggcgttacggtgatttgttcaacatgcgccgtaaattggcccttttcgataatatcgggtgaattttcccaatctatgaggccacctgcccagtttattgtaccgggtccgttggtttccgagccgcctggccaaacagcgatttctagtctcatcggcgtttgtgggtacctatattctttactaatggggtcccaggtatccttcttcaggactgtgcgagctattttaccatcaacataccatattatcctatccgggtcccaatcaatctcataagtgtggtaagtggcccaagtgtcagcgcctacgggaaatctttgcattcttgtgtaatccaaatgcccttgagaatagtagtttgattgggccgtcattaaatcaccacccagccactcaaaatcaatctcgtccccaattgcggatgttaagtcaaatgcagtcaccacacccctcgacctcgccgttttcattcgcacgcttgccttgccgtatagaaacgacctggtcgatgtgatcaaacttccggtagttttttttggcatagccagaacaatattcccgctactcgcttcaattgatgtgtagccgctatgtgtgaaatcgaaatcttccaacattttctctgcctctttactgtctggagtgaccaagaatttggcgtagtgtatgattctcttggaatttagctccccttctactacacccaccttggtatttgccttattcggtccatttccctctcttattggtggcttaggttgatagttcacaataaatttaggaacctttggtgtgctaacaaattcaagtttttgactggcgactaatgcaggtataggagcacagctttcctcgtcgaaagatgacctcacgttgcagccaccgacacatatcggtccagcgccacattcattatacggcgagcagcacggccattctgcgggacaagggttatttggagaacaagaaatggagtttttgggtttgtataattctcccagtgcaaatccgatgtagccaacaaccggcaccagctgtaatattgatattctcatatttttatttcgtgcaaaagcccttgatgatactctaaactaaacgactgttcttgtatttcgttattaatcgataattattagctggtattgtcttttttttttttttcctacatgatcgtcgcgaggctttacataatttttgtgacgcctttaaaagtatagtagaacgagcacataagaagtaaatgaaaagtacggcagatgcaattgacagtaaagagcggtacaatagttgaagaatacccgataaaaatgtatttaggttgcttgacgggtttgcagcaattgccaagaacactaactgtggcaatcttggtgagaatctactcccaacccaaacattttcgccgatatttttgctcaccttttttttttgctcatcgaaaattgttatagcggctcgactttgatttactaatacacccaatttctaatatcctcaaggctagatcgttctctcaaggaacttaaagtgcctgatcttgcgatgattaatctacagcgatggatacttaaatcatgtaaaaatctcagttttgaagtcgtttgctctcttccatgcttcagttcccttttggaaggtaatataatcatctaatttctcgcatattcacgccgacggaagaacgagccggatcaatatggttagaacccgtgtattattctgcttatttatatctttttttgctacggttcaatcgagtgctacacttattagcacttcatgtatttcccaagctgcgctataccaatttggatgttctagtaaatctaaaagttgctactgtaaaaacatcaattggctgggttcagtgacagcatgtgcctatgagaattccaaatctaacaaaacactagacagcgccttaatgaagttagcatcccaatgttcaagcatcaaagtttatactttagaggacatgaagaatatttatttaaatgcgtcaaattatttgagagcacctgagaaaagtgataaaaaaaccgtggttagtcaaccgctcatggcgaacgagacagcgtatcattattattatgaggaaaattatggtatccatcttaacctaatgcgctctcaatggtgcgcttggggtctcgtcttcttctgggtggctgtgcttactgcagccactatcttgaacattctgaaaagggtgtttggtaagaacatcatggcaaactccgtcaaaaaatcacttatttatccttctgtttacaaagattataatgaacgaactttttatttatggaagcgtctaccatttaattttacaactcgaggcaagggtctcgtcgtattaatttttgttattttgactatattatctctcagttttggtcataatattaaacttccacacccatatgataggcccagatggagaagaagtatggcctttgtgagtcgtagagcagacttgatggccattgcacttttcccagtagtctatctattcggaataagaaataatcccttcatccctataacagggctttccttttctacatttaatttctatcataaatggtctgcctacgtttgtttcatgttggccgttgtacactcaattgtcatgaccgcctcgggagtgaaaagaggtgtgtttcaaagtctggttaggaaattttactttaggtggggtatagtggcaacgatattaatgtctattattattttccaaagtgaaaaagtatttagaaatagagggtatgagatattccttcttattcataaagcgatgaatattatgttcattattgccatgtactaccattgtcacaccctgggctggatgggttggatttggtcaatggctggtattttatgctttgatagattctgcaggattgttagaataatcatgaatggtggcttgaaaactgctactttgagtaccactgatgattctaatgttattaaaatttcagtaaaaaaaccaaagtttttcaagtaccaagtaggagctttcgcatacatgtatttcttatcaccaaaaagtgcatggttctatagtttccaatcacatccatttacagtattatcggaacgacaccgtgatccaaacaatccagatcaattgacgatgtacgtaaaggcaaataaaggtatcactcgagttttgttatcgaaagttctaagtgctccaaatcatactgttgattgtaaaatattccttgaaggcccatatggtgtaacggttccacatatcgctaagctaaaaagaaatctggtaggtgtagccgctggtttgggtgttgcggctatttatccgcactttgtcgaatgtttacggttaccatctactgatcaacttcagcataaattttactggattgttaatgacctatcccatttgaaatggtttgaaaatgaattgcaatggttaaaggagaaaagttgtgaagtctcagtcatatatactggttccagtgttgaggacacaaattcagatgagagtacaaaaggttttgatgataaagaagaaagcgaaatcactgttgaatgtctcaataaaagacctgatttgaaagaactagtgcgctcggaaataaaactctcagaactagagaataataatattaccttttattcctgcgggccagcaacgtttaacgacgattttagaaatgcagtggtccaaggtatagactcttccttgaagattgacgttgaactagaagaagaaagttttacatggtaaggccccttgttaataattcttgcacgcatacttttgttattttgttgctttatcggataaaagttaatataaatcgatgtaaataattttatataatcatacaacagggtaataaaaagacgaatatattcaaatgcgggttctaaatctaagtttcattctcactatcactgctttcttcctttgcctgttgagagagtagttctttccatttttgagtgagctctcggattgcttcaggatttaaactagcttctacgagatcctgtggaacatgattttcggagtgctcttttgaagcgaatctccccgtgttatgcctcgtcactaaccttaattcataatcttcaacatcattcttcggaggtgctatcgcagcaatctcgttccatgaaaatagcaaagaatctgtcttcctggcaaacggatttatatcaacaatgaagattttattgaaaggtcttggaatataaacgtcaagaacgaaacttttatcaggaaacttgggcaggacgacatcatgaactatttcatcaataaggtccttgaaggtatctgacaactcatctaaatagtcataataatttaaatcacgctgggtggccccaacgatatgcgcattcttaacgaagaccctaaattcgagtgccggattcatatcacaccattgtctaagtaccaagtcaaatttcaatccttttatatcatccccgtccacgcagcctttaaatgctctttgaaggtcatgcattatgtaattggatgcgttcaacaataggtaaagctcatttacctcgttacacttcatagtgttattcggcaaaatccaggtagcgtctcttggtgcagaccagtttaacttgggagccactgcacctaattcgttcaaagcatcctttaatttctggtgtaattctggaaaatctatcaatggctcaacttcttggacaaattcggtggcggtatcctcatcgtcctcccaatcactatagtcattatcttcatttcttattatttcctcggtgtacacagacctggagttttcctcttggggtagcttgataccgtcttgttccaaatattgaataaattttttcggtaaggattttaacactatggattttggcacatatttgggatacagtgaggaccaaaacgagtaagaacagtgttcaacctgcgctcttgtcactggtatatctataaaagttgtatattcttgtgaggacatcaataagtaatttatgtcagcgctttttggacgcacgttttagtttcactggtggagttacggtatcattagcttcttaatcttcccactgcataaatggacatcggaaaatatccgcttattatgcctgaaaaaataatttttttaacagagttttctacgtactttttacttaactactgaggcagcgcaactgtttagtatttaaacatataagcatatatataatgcaagtaatcaggagaacatcttcgaaagagactttttagctttttcgttttgttgctttctttttaatttagtattatgaatagctttcaaaatggcagcgtcatttggctggaaagtagtggccatttctaggtcattgagagccatatctgtgtcattaacatggtaataggccaggccacgacggtacaaagctttggccttggctttttcgtcagccgcttcggcatataacacctccgatgaggctactaatacttgcttgtaatcttttaatttaagagcacagatggcaatattcaatggaatagacactttcaattgattgattttttcaatttgttccttctccaaatcttctgggaaatactctttcaagaatttatcacatttgacatatttttctaaagccacggaatagttctgtttcttgaactgttcagtaccaatgttctttaccgtttcgatagctttcaagacggtgtcgaaattcttcaagtcaactttttcgtcttgttttaaaacatcttcataattatcgccgtactcatctgttggtgtagcttcggcattctctggcacttgataatcgtcaggtaacacgccacagtcatcaatctttacatcacgcaatggcttgttgttttcttggtcacattgttggttttcaatcaaacgaacaattcttttaccttgaatcacttcaccaaacacaacgtgcttcccgtccaaatgaggtgtaggaacacaggttatgaaagcttgagatccattggtatttggaccggcgttggccatggatagaaggaatggtttatcatgtttaacagtgaaattttcatcctcgaatttttcatcgtatatgctctcaccgccagtaccattaaaattggtaaaatcaccaaattgacacatgaagtctttgatcactctgtggaaaatggaacccttgtacgacaatggtacatcaggtttagtctttgccataccagcatttccttcacacaacttcaaaaaattttcagccgttttaggcactatgtcattgtacaactcaaaaactatacggccttggggtttacctccaatagaaatatcaaaaaaagttttaggtctagtcatttttactccttgatcgcctgaatattgtcttaccagttttctatgtgatgtgagcgcatcagcacctctgatattcgacttatttaaataattttctgtctgaactttctccagctagggcggaaaaatattctagaagctcatagaaatgccgttcaaaagcgtaacagttatgttctataaagggaaacaatgtgtttcgatcactgcagctgtctattatatacaagttatacatcacgacatttagattttcatttcttcttttccgaatccttactggtcgtcccatccacgtccactgtgcttacgcgctctctattaccattcttttcccaacacttcctaaataacgccatctcgttgaagcactgcctccagtcacctgtttcggcatggcacagctgtaatgcgaggttctctacgtagcatccggtcttggatattctcgtgtcccacacatccgggtcttcgtcttcttggacctctttgtattcttccagcgcctgcttataatactctgaagtttcgccagtttcactcatgaccagtctgccagttttagcctgccagagcttttctttccctttaatcttcccttgtttggcgcaactcttagaagtgcctttcactacctttaatggctgaggcccctttttttgtttcggacatttgttgtgagaaaaaaaagaagaaaataaaagcataaatgaagcgaatggatgagaagaggggagggaaagcaagaacgagaaggacaaacatcagggacccatacttcaataaattgcttgatttggtgttaatcaattcttctaacatcaaacctcttttagtttccttcgatcgtttcacgttgcttatattgattgctttttacttctattttttcactagaataaacaaacaaagacattctgttgatcaagaaagttgaaaatggtatttggttttacaaagagggacaggagggtacctgatttatctaggtatgattactactatcagaaccatgaagattataacaaaagtcctcagctctctgctgctgctgcctctgctgcttctgccgcatcaccggatcgaaccaattactcaaggtcgcactcgctggttagtcatgcaccttcaataccgagacaaagaagttcggtaaagagcccaggaagaaggctttccacatcctctgccgctccgccaacgtccagggcagcagctaagcagtattcacagaagacttactcgttgaggtcgcaaaggagcggagagtaccatttacacccgcccggttatactactaatgggagccgtatgaattctatgacgtctggtgcgaatgtcagaagaaactacggtaagaacaaatcgacggccggcaacaataacgattcaagggccaactccattaccgtaaagactacacaagtaacagacccttcaggaaggactcaatcaattaccaaaaagacaataagaaaaataaatgggtatgaatacgtagaaaccacgactacgactaagaatttggttccattaggtgactcgcagcgtcatttcgatgaatttagtgaaaattacatgttgcaagatgacgacattttagaggaacaagctagtgataacattcacgatataatcgaggaaaacgaaacagataacgaaaagccatattccccagtaagcgaaagtcatttacaagatgattcagagctaaacgtggaaaaaccagatttcccacttggatcatatttccaccataagtattctacagacgttatgcctctagaagaagaaagtagtttatcaaacttcagtgacgcattagattatattcctcccacccatcagaccagtagtaaatatattcataataaaaggaagcaagcatcgacgacaagaaggaagaaaagaccgcctgccgtgaaaaacgcagaagcagaggccaagaaaccattaaccgaagcagaaatgtatctgaaggcactagaggttgctaaaagaaacgtttatcacacggatgctgcttcggataacgcatcggcccccctcgggagtaacaaatccaggaaaagtaggatgggtcaaaaaatgaccttgagaagcagtagtgattctccgacggcgactgctaatcttgtcaaatctaatgtcgaggttcaaccaaaaagatttacaagttccttcttcagcagaaatactaaaagcgccccccatgaagtgcacaatcactctgtgtctacacattttaaatcgaataaggctgttgacccagttccagagcctaaaagtgcaaacacagggctaacagataaagaaatgtatgaccaagctttgaaaatcgcacaagcgaggtattacaactcacatggtattcaacctgaagcagtcgataatagcactacggcggctaaacctcgtcaggtcggcgttagccatctgggatccactgggagcatcccgcccaatgagcagcactatttaggggattctgaaattccagtccaaagcgaagtgcatgaatacgagcccattccattgcagaagacaaaaacaactggttcttccaaaaataagttcaaaaccatgttcgataaagtgctgcaattctctcaagaaaactacggctaccagcacaagaaggaacaaggcgaacaaactccagttactcgtaatgctgaagaaagcttcccagcagcgtctatttcggaaggtgtgacaaccgcaaagccatcttcaaacgaaggtgtgatgacgaatccagtagttacagattcaccttcaccccttcaacaacaaatagactcgactactgcgtcctcgaatgggcaaagtcagggcaatgtacctacctccgcagtagcttcaacaacgagaacaagatcaccggaactgcaggataatctaaagtcttcttcttcgcttttacaggaccaaacccctcagcgtcaggaagacgccacggatccaacaacatcatcgacgaatgaattatctgccgctgagccaacaatggtcacttcgacacatgccactaagacaatacaggctcaaacacaagatcctcccacgaagcacaagaagtccagtttcttcactaaactgttcaagaaaaaaagcagccgttagcagttgtttactcgaattttgcaatcaaccctaatttttgaagcctggttttagatttattctcttctttttcttcttgtgaacttcaattactaatgtaacttaatttttaatataacttttacagtttaataatattgatttttttcggtctggaccaatcgcgccgcatttctcactaatattactaacataccctcttctcattggctcggtacccctttcgtgacccgcattttttgttttctttgttagcccgaatgtctcacaatgaagatgtaaaattaagattatatatgaaaaattgatacaaaacaaaatagttcaaataatcaagttaaagcgacatcactctcaatttttgctttttttaggtttatagaatagaaatataacagaacgaagcctttagactctttttttttattggtatattgaacaaagaaactttttttttgtcctcccatatctcgtgcacacaaatattatgtccattgtagcactaaagaacgcagtggtgacccttatacagaaagcgaaaggtagtggtggaacctcagagttgggggggtctgaatcaactcccttgttgaggggtagtaatagcaatagttcaaggcatgataacttatcctcatctagctcggatattatctatggtagaaattcagcgcaggatctagaaaactcaccgatgtcagtagggaaagataataggaatggcgataacggttcggataacgaaaaggcgaacctagggttcttccaatcagtagatcctcgcgtaattagcgatttgattatcgggctaagcgacggtttaaccgtcccctttgctctaacagctggtctatcttcacttggtgatgcgaaattggtcattaccggtggctttgctgagttgatctcaggtgcgatttctatgggccttggtggctatttgggagcgaagagtgaatctgattattatcatgctgaagtaaagaaggagaaaaggaaattttacgataactccaacctaattaacagagaaattgaagacattctgttagagattaaccctaatttctcggacgaaacaatcgtttcgttcatcaaagatttacaaagaacacctgagctaatggttgacttcattatcaggtacggtaggggtctagacgaacctgccgagaatagagaactaatcagtgcagtcactatcggtggcggttatctacttggtgggctagtaccactagtgccatatttttttgtctcagatgtgggcacaggtctcatttattctataatagtcatggttgtaacattattctggtttggttacgtaaagacaaaactatccatgggtagtggcagttcgacttcaaagaaagttacggaaggtgttgaaatggttgttgtgggtggtgtagcagcaggtgcggcttggttctttgttaagttactgggttaagtgtaaagtaacaacactatacatatttattgtaaagaaatttgggattgagaagctttgctatatacttggaactgggctggattttctcgacatacatttcttttacgttttaatttgtttctatattctcctctttaaatttatttatattaatgaatttcaaactagtttctttttctattgccaagaggcccatcaggtgatccatgataacctttattcgcattgaatcgtttttcattggatctaattcgtcatttggtcgccgcctttctttgctccttctgcttttttctttttctctttgactatcaggtcataagatcttctcctccattatgcccaagtgtttttcttttttttgcctttatataaattacaaaatacatacatatacttctcgtgcagtatactggaatcagctttataccatatgaagcacaacttggatcaggaccgctcttcattaaaaatcgaagaattatctaaataattaatgtgcacgtcaatatattctccgcggaaacatgacaaacttttagaaaaagatttaaagcaatatttttcagttctccatttctttatttttcaagaccaattctagttcaccaatatcaaacattcctatgccttcctgcagagcatctgccaaaatggatagtgatttattcgtgaaatccggggcagctctaagacgattgatatcatcaccgtagttttcaaaaagtaaatttaagtattcttcccttaactttgtcttgtctttccctttgggcacaaagttttctgccaattcattgtattcttctctcgcaagcttgatattttcggcaattttcgatgcattcataaaaccctccttgttttgagatttcgtaggctctgggatcttgctcaaagaaattttggttaaatcgtctatcacttcttttgaatttaacttcaaatccttgctttcttcgtctgtaagctcgacatccgaaacttctattgcaatgtcctcttgtttgtcttcgtcattaccttttgagaaaacatgatcacttttaccattttctccaacgtgttcttcgatggccccattttggatttcctccttttcactttctgatgatggatccgatgatgaagaatctgatgatgaaacatcagctgttcttctcttcttcctccttctgttttttttgacagacttgatatttatggctgatatatcacctgccgacatcctgtataatatattatggctagttctttccgtgctatttcaagtgggcagtttaaattcttgtatatattactacaatatatgaaagttttcgctcttcgttttttgcaaatttttagtgatgagctcttcgcgcaaagaagttttcaatgcccgtaaaggcacctaattatatatcgaattattttaagctttccgcttcatcaatgcattttgtctttatatatctagtttacaaaataatatgttgctattgccttgcttttaaaggctcaatatcttggacttactgcctagaatagcttatccatttccactagcgcgtagtctaatatgtaactttgttcaactaagttatcaacccttgtgaaatgcctttgcgtgtatggaattattgcatcaactatctttaccattccgggtatctcactcaattttgctatgttatgatgcatcaaaatacatcttattgttctttgcgctatggtatgtgtttttgcatttgtattccaatctctgcatcgtttcattaacaaaattaactgttcatcatttaggatagagatggcttggtccaattcttcattgaaaatgacttcaattttgccctcttcggtatcttgtctagaccttgattcgcccaaagctcttttcaaaacattaaacaacctcattgggtgatctaaagtcattgctaacaaaaatgcatttgtccaatcacctttgctcatataattttgaagcgattgttcttgttcgacttgtaatttagctttttcttgttcttcttctatttcttgttccgtacaatctttccaaaactgaaaaacaccatctgcatcagcacttacgatcatatcaccatcattcatagtacttaaagcccataatctattattatgaccatccaaagtcttcagacattcaccgctagaacaatcccatattttgatcaagccatcagcaccacaactgatcagttgtttttgcttattaataaacgaacatctttgaaccgcattggtatgaccttccaatgttttcataacgctgaatgtatccaatgaccatatcttgactgttttatcacctgaagaagttgccaataatttatcatattggcaaaatgatacatcccatagtccacgcttgtggttggccaacgtggcttccaattcaccattttctaggttccagatcttacaggtcttgtcgtatgatgctgttgcaaaaatagaatcgttaggagaaactgacaaagcattgatatccttttcatgggcatgacgagtatattcggataccttgatgatttgaacatccatactagcagttggctttggaattatccatttcttaattgttaaatcattcgatgctgtcaataaaaattcaggatatccctttgaaactatatttggcaatccaacagcagttacggcagctgaatgaccaatatacttggcataaatatcaaacttgcagctgttctcattgtatctccaaacaatagccgtattatctttagaggcggttgcgatccacaggccatcctcagtagcatccaatgaatttagcaaatcttcatgaccttcataaatttcgacatccaaaggcagcgaagcttctgggcctgataaatcggggacgggtattatcctaagcgatggagaattggtagctaaagctaatttattcagctctgggccaacatacctcatgtcagcaataataccatgattaccagcaatgctcgaagtgacctgtattgtgtcttcatcattctttaagtcttcttcaacgttaattagttgtaatgtctggtcagacaatactaaaaacatctgtgaattgctcaatattggaagtacaccaataatgaataactcttctataggtttattggttcttttaagcacgctaccagattcagagtcaattaactgaaagatagcatcaccgccggctgtataaattatgcgtttaccgtcaccatcctttaggaatccgcatgactctacctgttgatttactggaagtgttttcaacaatttacatttctttttcatattgaaatcccagagattgatgatatcgtctctaccaccggaaagtaaatttaggcttggctcatcattatctggtacctcaatgatatccaaccctctcacagcagatgtgtgctcttgtaatgtgtgcaagcacttccttttaacaagatcccaaacctttaccataccattggtgtcaccggatgctaataaccatattttactattcaattgtccataaaacttcaaactggaaattgtaccaccatgacctttgaacgaatgagtaatgtaaccattttcaatatccacaacaattatactaccatctgtccctccgactgcgagaagcgttgaagtggaatctgcgtcgagaatgtacgatggagaagagattttcattgatctgacaactttcccggtcttaaggtgaaagatttttaaaagctgagcttgtgaaacatacgtgagatattgaccatcaggagttaatttcagtgcagtaatttcttgctcgtcttcattagaaatcttgtgcaaaatttttctggagcctggggttaaatcgattatgttgatttcgtcaagcaccggagtagctagtattttaccattttctgaaacagtggcaacagcactgcttcctgcataaatagggtttaacgatatacctttatatgaggttttcagatccatattgtacgtagtatggcttactaccgttgagagtactatgttgttggttcacacctttaatgccataccgctattatatctgagagcgatgagctgaatttttcagaaaattttcagtcgctttacacggatatattaagaagctccatcttaatcgccagaagagtggatgaggttatcatctcaactagagtcgaagagtaaggcaatccatcaaatggggttgcttgaggcttatttacttttatacgtctgattggacggattataccagtaaaaaaaatattgattgtgtttttctataaaaatatgcatatataagtaaaaaaataacatgtaattcttttcaaccaacgataaagcaaaattcagagtagaataaggcaaagtcacatactgatgatgatattgtaaacgaaaggtgatttgattgtagtaaccataaaaaaatgcaaaatagctcattgtaagacgtcattgaattcgaatgaatggttaacatcattgcccataattccttcgatatctgccaatgcactctcactaaataaaccatttttagtgaaacgaagattttcagccgctgcttccaccatactttgccttcttctccacatggaattactattttcatggcttaatgtattgtcgaattgcacaggagcggttaacgatgctaggatatcggcgtcagtatcttcgatcacatgaccttcttgtgcatcataaccgttaatatcacctacagacagtaagtcattttcatctttgcccaaaatctcatgaatttcatctaaaccaacactttttgttgaatttttccttgtattgctgtccacggcaagatcagaattatgaggtattaatgacgcatcttcaggtgcgtgagagggaagttcattcataggggtattttcattggttgtaaaatcggtaccggtatttatgtcgctatggctgttattgttaccgatgatctcatggccattgattcccaattgtaaattcatagtttcttgctcctttattgccttttgtctttgctttcttattttaagaagcttcttttttttctttaactgcctttttttttcagtttttttccgttgtagctctttcatcttatcaatcttctttcttgttctttcattaccaatatagccaatgggaacttttctgttagaatttgctggtatcatgtactcatcttcttcataggcattaatacccttatttctaaatgcagataatggaaccttaggaacttcataccaatctgcagcatggccatttgtgcttttgctattaattgcatcattgtaattgttctccatatcgtctgtgtgggatggtgaatcatcctccaattcactcatgtttagcagctcattgagtgtcaattcgtcaccgttattgccattagagcttccctctcttttaacatctggggtttgagccctttgatgttgctcgcgaagctgttgatgttcttggattaaggcgtataatgatttagtagacagaccatcaataatactaaaaggtttgttgtccgtctcccaagtacccaattttggtggacgtaatccaacaacatttgaacttacgatttcctttgcttttgagccaatgttttttgaccttgaacttgggggcggtaggttatcatcttcatctgtggattcgtcatcaacgtacacaacagtctctaagagatcatgtttgcaatctttggatccatcagaattttctttgtctgagttagaacttatcaaagaggaagatccatcgctgtcgtaatgaaagtaaaaagagtctggatctaaatcatcgatgtctatgaacacatttgtcacgctggaatcatcgtcgtcgtcttcgtaatcgtcgtccagttctgtgccaatgtctaagctatctgaatctagtgccctcaattcttcatccgtgtcagcatcgtgggacgtttcagattcactgcattcatcatctgaaggcatatgggcaacatccaacaaaatgttatcatattcatcgtcagaagaatcatatttcccggaattcaggaccgtactatgagtggatggttccagatcatcattggattttatcaaattcgagcctttattcttatgttcaatatgacttttgcccgatttatgcctgcctttcttgctcttatggccactattttcatcatctgattgaaaaaaaacattgaaaatatactcatcattgtccacattggaggttgttctcgtactaggtttttgcgtctttttatagagctttcgtctttgtttcctttcttcctgttcccgttttttggcctctttcttttttagtttagatagtttttcatcatttagcattaacggtaaagatgtactcaaggatagctttggctctgaaccatcgccataataataaagatttgcaaatttaggatcttcataaaacggcatatcaaaatcagacattatttcatcttcttcgtcatcttcttcatcatatccgttttcttgattgtattcattttgcaaaaatttattttcagcatcttctacaggatcagacccttcttcgtgtatactaccatcgaatgagagttcgtcgtcattttgtagctcagaaacaatgttttgttcttcttcttccaatatgggaagatcgtcttcccccgtttcaagatctgtaccaatttctccatgagaatcttcattgttaatcacgtcaaagtacgcatcctggtcaatatcatattcagattcatctgactctgaaatattgggaaatcgtaactcatcgttgttacctaacatcaccttagaatccagtttatcttcttcattaccattgttctctttgttttttaaatccaagacttcttcacctatatcctcgttatagccttcattaccattaccaaaactaatgccgtcgtcctcttttttgaatttaaacgatagcgcctgttgtgtagtagtagtgcctgaaccgtttacttcttttttgtttgattcttgttgtttttgttgctcttctttctctttttctttttcttctttctgctcttcttcattttctttcttaggggatagtttaactgatttatttttgttactgttctcacgagaggaatagagtgtattgctatttgtattcatggcagataaagctttcatggctcttttctttctttgggccgtcagtttgacaaaatctatattctcgtcatcagaacttgtttcgctatcactatcactatcacttccgtcatcatcatcgtcgtcgtcgtcttcgtcatcatcttcttcttcttcttcactctcttcttcttcattttcactctcttcgccatctgttacagcttggtaatcggatgactctgtgccctcgtcgtcattgtctatttgcctttgtataagtttacttttttttccttgggaattatttgaaatgttctttgcttttcttttaattttatgtgggtttgtacttttgtttttatcagaatcagatacgtcactcaaggatgactcagaagagtatataaggctaaatcttcttggcctcgttgtactcagtgtgggtggtgattgcctggactttgtatcggattcgcccttttttatgagccttttaatatttgctggcagtttaccagaatgtgtactatgattgatcgtactttttcgaggactttttttgcctgccatttcgttctgtttccagtttgccggttgttttttccttatttgtttatttgcttccttgttgaatttccttcaatttcaacaagcttgaaaatgaatttcgtagaatgaatattactatgtttgaaatggttattgcttatgatgctcaccgaagttaaaaaaaatattataggtttgtcctatgttagaattgtggaaagggaggaatgtaataaataagcagtaattaaatatagccttttgaagagttcctccttttaatttcttgtagcaagtgtttcgaatgtattcaaatattaccaatgattatacaaatacttacagcaagtcaattaaagagccgtaaaagctaaacgtcaaaacgtgtaaagcacctattatctagtctcttttccctagttgtactttaaatcaatttagtgatgagatgaaaaaaaaaaaaaaaaaaaaaagaattccaacgaaaaagaaacgacgggcagggcaacctttagagatttcaatccgtataaagagatgtagtaggcagtacgggtaacatcgtcacaattcataatggaactatctagcttttgcttgattgcaaagttctacacccgttgatacttcaaacatctttgcaatacgtaggtaggggtcgcgtactagcagcctcctagttaagtgtatctttcaatcgcattacggaacaactaggcatcccgaaccccacacggaaaaatcggaacaataactgaaaatttcctttttcttttttttgctcttcaaagtctctgcccctctattgcgtactcgattgatttttttatcaaaggccatctcagacaagtagatctacattggagtttctcataatattatcactatcggaaggtagcataacctttaatagagtttccgctgtttgcttggctcgtttttttgtttgtactatgcctattggcgcaaagaagacagagtgtgcaaacaagagatgaatcagagcgatagcagcttgatggatttaccactggagatacatttatcattactagagtacgtgcctaatgaacttcgtgctgtcaataaatacttctacgttttgcataaccacagctataaggagaagagtttggcgtggatagctgaggacaactatatatgggccgttgtcaaacattcattatgtttatatgtcaagagtttggacccacttcgacagcatgccagagaaatcattcaagaaacgaaggaaccaggttttaatgtgccactgtgcatgactaaatacatcgcagattcttggtatattgtatacaatgcgctgcaatatcctggaaagataattaatatgggatgggacaaatataccaaaagtcaagattcaaatggttctgattctaccagtaactttaatagtcggcccaaggaaagaactcttatgcagtcgttgacagctttacctgttaacttttggtccaggaggaaggacgagcctacaccggtaaacgtttggttttatgtaaaaaatgcgcacgttgccagatacataccgaaaattattacggaaataggcatatgcaactatgggccgaagcagatcgtggcaagtgcaggatatatcaacgaattgataacatctgaaggaatatactgtgttaacctaggccaccttcccaggctatacgatgagcaaatttttgaaggcactggaacgacacatcttcccctggaactgaaagctatcgacaggacagattcagatgtttgtatcaatggtgatttagttctactcggttatgactttattccatatcagatatcgaagccgtggttactctttagaatcgaacccgtaaatagcattgaagcaatcttcaactatagtgaatgttctttttcataccagtttgcatggagtttggcctgcttacaatctgaagagaaaatttcatttcctagagacacgataattgggcacggtttaccttacaagccatccaaattgataagaattttcgtctacaagcatccggaacaaaagcaagatcttggtcaagaaatagcattgcccaactggaataccccttatcttcgaagatgaaaaaaaaatttatcaattagtctataatatatgtgtatatacgtctatgcacctacctacttataaatggatataatattcttgcaatgatgaaaatatgtatagtcaaatttcatttttttcaattgataaatgtactttcaatgatggaaactccttcatcgtcatcgaatttagacttctggcagaattggtaaatgaatggcttcatgtttgccagattttcagcaatagacctaatgaaagcgggcagctcactcattatatcgtacctattgactaatcttaaattagattcttcaaaaccacgcggaaatgaaatggatgtaggatatttccaaccattttgcttatcctcttttgtagatggaaatttaacagcatgatcatttacacttgacccgacctccaaaattttgtccttatcactaaccgcccatatagtcactgtagtgctgccatattcttttgttgtggtgaattcaatacacatcatcgaacgcttctcaccattgaaacaaagaaaattccatttactagccgccttattgggtattagcccctggacagcatccagatacaacataggcgtgtccttcaagtccagcttcacaggtttatcgtttttcttgtatgagatggtaccattgcaaaaacctctaggaacaaaaacatgtcttatcatttttctggacgtactagaagagtctctttttgctaactcttccaagctgatgctcttgtcaaggtaataattggaaccgtccgggtttattatgaatccttcttgtaaatttacggtaatgtcaaccttcaaatcttttagtaaacagcttgtacttcccttcggaatatctatcttaattaataattgagcaaatccactggaggaagaattttccaaaggtacgaagtgaaacgtaacattgtccgattcaacttttaacgtatcaaaatctttgatattatcaattttaaagctttcccatatatcaatgtcttcttcagagttttcctcactgctggctttaaatattttgaaatttaactgaaaacctttgtatataccgcccataacactggaatataatagttgaattaatccacatttgccgttggtgagatccgtaaaatacagagtttgtgtctctattcttgtttccgttggatttcttactgcttttaataaactatgtgacttgaactttttgtgatttgacgtcctgcaaaaccattctagtttcgatgtatcctgaaatttagtataattagcatgatccttctcggataaaacttccttaacgggggcaaatttcgtcttctcctttttgatcgcaaccgccattttttctttgctctatgatttttatgttaattaaactgttcgttgccctaaaattttgaaaatttctcgaatatttagagagaatccgtcactattttagtatctatcttgtctatttatatataaaatctcattcccctgttatggtttttgccaagccctatcccaaaaaaccaaatgatacatgataaacctatttatcctctttaacagacctatcgtttaaagcttttttattgcaaaccctattcattatggctttttgacctaggtctcattgtgacttctatttttcactgttcagtaaaaaaagaaaagtgattaaaaagtatcactatttctgttagaaagcaagtagctattttgattggtaattatatacacatattgaaggaggccgtagtattttcgtttaaaatatattacagtaagataatgtctgctacatcttcaagtggtgacgtgaaaaaatttcaagctgtaccaaaaccaacgagcaatgcatcaccaccaccagcatcgagtgggtttaacgcaaggaccctatggccggatttgatagaaacaccagaaaaccagtgggtttttgagtgcaaagatattattgaaaagataggcactaatggaccgatagcagtggaaataaaaaaaaatatggaaaaatgcttaatgtacttttacacacttaaaaaaaaattaaatctttttgatcacacctatacggcatcatgcattctattttacaggtattggttcatatatggaatacctacagccataactgaatgtattcatatatcacagggaattctggtcaccgcttgcaaaacaatggagaataataggcctatagaggcctatattaaggcgacttgtgagtttttgatgcaaaatataccgtctttaaaaagtcgaacaaatattgataaacttaaatgggaatttagagataagttagtgacgaatgaaaaaaaaatactatgtttatttggctttgacttaaatatcagtaatccaaaagaattgattgaagaagtgttcagtggctattatagattcaacagggatcacaatctgccagaaaactttaaaaaagcttttccaaaaattcttcaagaatcaagaaattttatggtccaagctgtcacccagccagtttctttattgtgcgacggttatacgttcattgtactatctctcatatactgtggtttagagtataaaaagcttgtagacaaagatttcagatatccgaaaaacttcttcaaggatagattccctatcgaagtaacgccggaaaattttgccaatatctttaccgattacaagttactggaagagaattttttcaacttaaaaagtaataaaggtgctaaattacaaattgattcaagcatgattgattcggtgattgacgaaagtggcgatgtggaaaatgaagtttcagaaatctctgatccgtttaactacgagttgattaaatccggtgaggtgaaggaagagtttttgaatcatattgaaacaagggttaaagatttactagataaggctaaacaagaaagtatgaagagaaaggctaaagatcctataagaaccccagatgccaaaaaacctaaaatataaaaatagagtacaagttatgtttaattggagggatcagtaaaggtttgatatatacgtgacaaaatgtccggcaagttccctatgttatcctgatagcaatatttccaatactcaatccaatgatcatctgtttctggatctttaggtgagtcaaagcgcagtttctgcttcaattttgttttcatcttgtctattattattctgggatgtctgaattggtaagttcggggatgataatcgtccagagattctgaacagtcattatcttcggatattttttcagcaacaagtaatttcccctccatagcagtcaacagtaccttaggtagttggtagtcagttacttcatcaggattgtcacaagcatcaataatattttcgatgatacataagcattctatggtcaatttatccatttcagatgatgcttcgaatgtgtattcattatcttgcatatagtatagttttaatacataaaaaaactggataactttaaattgaacacctgatgaaagtaataagccttccagaattttattcaagcagcatataatctgagggtcatttttaagtttgaaagttattgacagaatatttttttgaattgtttcattcatgtggttactatctactaatagtccgattctgggaccgaacacatcacattcacactcccaaatttttcctctcagaatggctaacatttcttcgatttctgcacaatactgaaaaaactgactaaaaacaaaattttcattgacctttgaaaatttaagcgttatcttatccatcgcatcgaaagcgacgcagtataacgcctcaataacatctacctcgtcgagtgaccagtgccattgaagtgacttggtctcctcatttaaatcgaagccatgggaataattagggttttgtcttttgataaaattttttagattattgcctaccaatgcttcattttctttcaaatcaattagaaaacagtggcaacacaacatggatataaatagttcgcaaagttcataaaaagctccaatttgctcgtctgcgatacttgcaaatagtcttgtcctttttgagtacgcaatgaattgtaagcaccagcgaaaagattgaaatgcgaggttataatttttatctacatgaccaaatactccttgaaataattttatatatagtaccagttttaatttattcattgtctctggatcggctttatctttcttcattatcttgatgatatgttttggacccatcgcaagattaaagtttaaaattttggccagcgcttctttcagaaggttattggtttgaatccttaatggtgaaccttttttcatgatcgaaagattataaaaaactacatggtacggaatataaagagccaaaaagtcccttatcaaatcaccattatatgcttgtaaatttaggatagtcttcacagcttttttaaattcttttcttaaactttttttaaaagtttgatagtcgacgtctttattcattatacgtgagccgacaatttgtgactatgatcaataaatagggcatatatgtacaattttgtttgtatttcctcctgttggagatgagtagtaacataatcatgggtaaatcgtcttctctgtgacagcgcaaacctttacgcccaataaaaatttgacagaaaaattctctatagtgccggggcacttcattcaaatttagtaaatagaacttttgtggcaatggacaggttcagctactgcatttcatatgcgaattcgctgctataccagttttgtggccccaaaatcacccggcagacagggtctggtaacacgtcataattctttccctacttacgaacgtaaaggaagctttgccaacttttagagaaatggctacattaattatgaactggagtgaaacaactgtgctaaaatgatacgatctagtaatttataggaaaaagtaaagatggcaaaaaacaaaaaataatgagagctaagggattcgaacccttgcatccgaagatatcagagattttagaggttaaacccacctaaatctgacgccttaaaccactcggccaaactcccattgtatgttgaaaacgatggattatacaagccattgggttagccatttatttctaaagtctttttcttggctgattacttattaatgagaaattggtaaagtttgacataattgttgggattccattgttgattaaggctataatattatgtataagaataaactagaagttctcctcgaggatatagaaactctcaaatggaatcgatatttctacacaataatattacgattatttctccttccgttttatatttttcattatcttattacattatcaatccttccatttcagcttcctttaacttcggttgcatcttctcataccttatgtcatcatctaactacccgtatatgataatatacgcgtagtaagactactagttaatgacgatagttgatttttattccaacaattaagttagcaaatgtgggaaagcataaattatttgggaaatgcatatatctccgcgatttccctagcttaggagctctttgggatcgatatcatttttgttggaatatgttggaatagaaatcaactatcatctactaactagtatttacattactagtatattatcatatacggtgttagaagatgacgcaaatgatgagaaatagtcatctaaattagtggaagctgaaacgcaaggattgataatgtaataggatcaatgaatataaacatataaaatgatgataataatatttatagaattgtgtagaattgcagattcccttttatggattcctaaatccttgaggagaacttctagtatattctgtatacctaatattatagcctttatcaacaatggaatcccaacaattatctcaacattcacatatttctcatggtagcgcctgtgcttcggttacttctaaggaagtccacacaaatcaagatccgttagacgtttcagcttccaaaacagaagaatgtgagaaggcttccactaaggctaactctcaacagacaacaacacctgcttcatcagctgttccagagaacccccatcatgcctctcctcaacctgcttcagtaccacctccacagaatgggccgtacccacagcagtgcatgatgacccaaaaccaagccaatccatctggttggtcattttacggacacccatctatgattccgtatacaccttatcaaatgtcgcctatgtactttccacctgggccacaatcacagtttccgcagtatccatcatcagttggaacgcctctgagcactccatcacctgagtcaggtaatacatttactgattcatcctcagcggactctgatatgacatccactaaaaaatatgtcagaccaccaccaatgttaacctcacctaatgactttccaaattgggttaaaacatacatcaaatttttacaaaactcgaatctcggtggtattattccgacagtaaacggaaaacccgtacgtcagatcactgatgatgaactcaccttcttgtataacacttttcaaatatttgctccctctcaattcctacctacctgggtcaaagacatcctatccgttgattatacggatatcatgaaaattctttccaaaagtattgaaaaaatgcaatctgatacccaagaggcaaacgacattgtgaccctggcaaatttgcaatataatggcagtacacctgcagatgcatttgaaacaaaagtcacaaacattatcgacagactgaacaataatggcattcatatcaataacaaggtcgcatgccaattaattatgagaggtctatctggcgaatataaatttttacgctacacacgtcatcgacatctaaatatgacagtcgctgaactgttcttagatatccatgctatttatgaagaacaacagggatcgagaaacagcaaacctaattacaggagaaatctgagtgatgagaagaatgattctcgcagctatacgaatacaaccaaacccaaagttatagctcggaatcctcaaaaaacaaataattcgaaatcgaaaacagccagggctcacaatgtatccacatctaataactctcccagcacggacaacgattccatcagtaaatcaactactgaaccgattcaattgaacaataagcacgaccttcaccttaggccaggaacttactgaatctacggtaaatcacactaatcattctgatgatgaactccctggacacctccttctcgattcaggagcatcacgaacccttataagatctgctcatcacatacactcagcatcatctaatcctgacataaacgtagttgatgctcaaaaaagaaatataccaattaacgctattggtgacctacaatttcacttccaggacaacaccaaaacatcaataaaggtattgcacactcctaacatagcctatgacttactcagtttgaatgaattggctgcagtagatatcacagcatgctttaccaaaaacgtcttagaacgatctgacggcactgtacttgcacctatcgtacaatatggagacttttactgggtatctaaaaggtacttgcttccatcaaatatctccgtacccaccatcaataatgtccatacaagtgaaagtacacgcaaatatccttatcctttcattcatcgaatgcttgcgcatgccaatgcacagacaattcgatactcacttaaaaataacaccatcacgtattttaacgaatcagatgtcgactggtctagtgctattgactatcaatgtcctgattgtttaatcggcaaaagcaccaaacacagacatatcaaaggttcacgactaaaataccaaaattcatacgaaccctttcaatacctacatactgacatatttggtccagttcacaacctaccaaaaagtgcaccatcctatttcatctcatttactgatgagacaacaaaattccgttgggtttatccattgcacgaccgtcgcgaggactctatcctcgatgtatttaccacgatactagctttcattaaaaaccaatttcaggccagtgtcttggttatacaaatggaccgtggttctgagtatactaacagaactctccataaattccttgaaaaaaatggtataactccatgctatacaaccacagcggattcccgagcacatggagtcgctgaacgactaaaccgtaccttattagatgactgccgtactcaactgcaatgtagtggtttaccgaaccatttatggttctctgcaatcgaattttctactattgtgagaaattcactagcttcacctaaaagcaaaaaatctgcaagccaacatgctggcttggcaggacttgatatcagtactttgttacctttcggtcaacctgttatcgtcaatgatcacaaccctaactccaaaatacatcctcgtggcatcccaggttacgctctacatccgtctcgaaactcttatggatatatcatctatcttccatccttaaagaagacagtagatacaactaactatgttattcttcagggcaaggaatccagattagatcaattcaattacgacgcactcactttcgatgaagacttaaaccgtttaactgcttcatatcattcgttcattgcgtcaaatgagatccaagaatccaatgatcttaacatagaatctgaccatgacttccaatctgacattgaactacatcctgagcaaccgagaaatgtcctttcaaaagctgtgagtccaaccgattccacacctccgtcaactcatactgaagattcaaaacctatatctgaaatcaatcttcgtgcacccagagaagttgaccccaacatatctgaatctaatattcttccatcaaagaagagatctagcaccccccaaatttccaatatcgagagtaccggttcgggtggtatgcataaattaaatgttcctttacttgctcccatgtcccaatctaacacacatgagtcgtcgcacgccagtaaatctaaagatttcagacactcagactcgtacagtaacaatgagactaatcatacaaacgtaccaatatccagtacgggtggtaccaacaacaaaactgttccgcagataagcgaccaggagactgagaaaaggattatacaccgttcaccttcaatcgatgcttctccaccggaaaataattcatcgcacaatattgttcctatcaaaacgccaactactgtttctgaacagaataccgaggaatctattatcgctgatctcccacttcccgatccgcctccagaacctcctaccgaattatcagactcctttaaagaacttccaccgatcaattctcgtcaaactaattccagtttgggtggtattggtgactctaatgcctatactactatcaacagtaagaaaagatcattagaagataatgaaactgaaattaaggtatcacgagacacatggaatactaagaatatgcgtagtttagaacctccgagatcgaagaaacgaattcacctgattgcagctgcaaaagcagtaaaatcaatcaaaccaatacgaacaaccttaagatacgatgaggcaatcacctataataaagatattaaagaaaaggaaaaatatatcgaagcataccacaaagaagtcaaccaactattgaaaatgaatacttgggacactgacaaatattatgacagaaaagaaatagaccctaaaagagtaataaactcaatgtttatcttcaacaagaaacgtgacggaactcataaagctagatttgttgcaagaggtgacattcagcatcctgatacgtacgatacaggtatgcaatccaacactgtacatcattatgcgttgatgacatccctgtcacttgcattagacaataactactatattacacaattagacatatcttcggcatatttgtatgcagacatcaaagaagaattatacataagacctccaccacatttaggaatgaatgataagttgatacgtttgaagaaatcacattatggattgaaacaaagtggagcgaactggtacgaaactatcaaatcatacctgataaaacagtgtggtatggaagaagttcgtggatggtcatgcgtatttaagaatagtcaagtaacaatttgcttattcgttgatgatatgatattgttcagcaaagacttaaatgcaaataagaaaatcataacaacactcaagaaacaatacgatacaaagataataaatctgggtgaaagtgataacgaaattcagtacgacatacttggcttagaaatcaaatatcaaagaggtaaatacatgaaattaggtatggaaaactcattaactgagaaaatacccaaattaaacgtacctttgaatccaaaaggaagaaaacttagcgctccaggtcaaccaggtctttatatagaccaggatgaactagaaatagatgaagatgaatacaaagagaaggtacatgaaatgcaaaagttgattggtctagcttcatatgttggatataaatttagatttgacttactatactacatcaacacacttgctcaacatatactattcccctctaggcaagttttagacatgacatatgagttaatacaattcatgtgggacactagagataaacaactgatatggcacaaaaacaaacctaccgagccagataataaactagtcgcaataagcgatgcttcatatggtaaccaaccatattacaagtcacaaattggtaacattttcctactcaacggaaaagtgattggaggaaagtcgacaaaggcttcgttaacatgcacttcaactacagaagcagaaatacacgcagtcagtgaagctattccgctattgaataacctcagtcaccttgtgcaagaacttaacaagaaaccaattattaaaggcttacttactgatagtagatcaacgatcagtataattaagtctacaaatgaagagaaatttagaaacagattttttggcacaaaggcaatgagacttagagatgaagtatcaggtaataatctatacgtatactacatcgagaccaagaagaacattgctgatgtgatgacaaaacctcttccgataaaaacatttaaactattaactaacaaatggattcattagatctattacattatgggtggtatgttggaatagaaatcaactatcatctactaactagtatttacattactagtatattatcatatacggtgttagaagatgacgcaaatgatgagaaatagtcatctaaattagtggaagctgaaacgcaaggattgataatgtaataggatcaatgaatataaacatataaaatgatgataataatatttatagaattgtgtagaattgcagattcccttttatggattcctaaatccttgaggagaacttctagtatattctgtatacctaatattatagcctttatcaacaatggaatcccaacaattatctcaacattcacccatttctcagaatagatgtgaactctttggttttcggtcagactagacgtcagtaaatagtttgaaagcgagaataaaaaataattgtaatggataatgaaatgccgttaattggtagtattaatgaagaatgaatatccatcttttcatgcaatataagagaaaaatataaaactgctgagatacggacaaaaatcacctatgtacaagtatttattttatcatatacggcgtaagaagatgacgtcaaaaattgaggaacagtcatcgaatttaatggaagctgaaatgcaatgatcgataatgtaataggataatgagtaacaacaattaaattgaagaagaaaaaatagtgatgctctgtagagatgtcatttcccttcaatgttgctatattctcctggcacattaacgtatgcccactattagtgcctttaacaatagaatcccaacaattattcaattattcacccataaaatccacctatttttcaagaaagcattagatttgctcattattatttattattaacataaaagtgcctttggtagttactatgtatttagtgtggtgacccgtattcctcatatatataagtagctaccacattatgttcaatcaatatatctttaactcagctcagcattgtctgaattgctcgcttaagtttttatcctgtgattagtgcatttacacataaacgtataccgggtgtacctcaatatactatgtaaacatttaaattgttaccataacaactcatgttattattaatgatcacttgacaacatataaaaacgaaagaagaaataataatactactatgtataagtatccatttccttttgtggattcctcaaaatggccagtatattcggaagtaacataatgtagttattcatcgatgaggttcacattctgtagcactgacccatcgaaagaaaagagtttatattttgataaattacataaaagctgaaaagtttgtagtggtcatagaaggtaacccacctcctaagaaatccagcatcatatgcataccaccacctccactatactcatcaacatcctgtggtaaaacctgtgatacgctatccaagaaccacactttgtcctttatttctgtggtataacctctcaataatgtatagtaagacctcattattctcatggcccctaggtcgcctgtcattaataatgctaaaaaagtcctatccaaaagagcaggaaatgagaagactctcaacataaaatctaattgatttttttcgcgatgcagtttgtccaaatatgctaaagttatcaagtacggtgaatcaatttctacgggatataaatctgctatactttcgtcaaagcatacgagttccgatatcgtattattgttatttccatcaccattattgctattgtcattatcattattatgattactttggttgattacagcttcacccaaatcactcaagtcaacagaaattaagttataaaacttggatgtctccgacaggggccatacagcagttagtatagttacggcgcctttaacatggaaaatccatgccgttggtgagctgcttgaagcatttgccaatgaatctaggattaatattagagcactagccaccaaagcatctgtgttatcatctgaaatttcgagcacagcctctcttaacagtctcaacgcttctaaacgatgactagacacgtagttatccaagccggcttcagttctggacaaatgagtggcgctaaaagccaaaattgtatgcatcaagaagggaaaatgaaaagccaaatccggaatataagtgctccatacttcaggaccagaaatgcctgcttcggttatggtatgccatacgtcagtacaatagtgatgaaaaagttttagatctatcaaattcaaatttgattttctagacagcccgactaattcagggactagtcgtgaggctgatgaagcgtttgaatggggagaagattgttgttgagtgtgagaatttgatgaacgtggagacaatgcctccgagttggataacaggtcacccattggggacgtcttcaaagtaggagaatttcccaaagcggtcctgttgtccggtatagataacaatgactttgtagaggttacattggatactcccgttgaaggggacgcaatgttttgatctatggaaggtttggacaacgtgtgtgggggactgattgtgagaccggtattgtcgattatcaagtttttgttatgagatagtatatcagaagcagtaactttattttcgtttccgttaagggggttattgcccgaattaacagcatccgtcttagtattatccaatgggttcttcgtaaattgcttgtttttgtcctcctgttcctgttgcatatttgcgagtgcctcctctgctgtgctaactttgattgctctgttattagatgtagcaaactttccgaggccaaataactcttgaaactcagaggccattccatttgcagcaccgtatggaaataatgtattgaagctcttcatattgaagttcaagcccatcttgttcaattgcgctagctggtcgaagggaatattgctgaagggggactgtgttccttgttgttgtggaatttgctgattttgttgttgaagttgtggctgctgcaatccattcgtcaccgaatttagcctaccaggcgagagtaagccgttaaggctacttgataaattcatggccgttgattgaaaactaggtgttatcggtatactcaatggcgaattccctggtagggccatgtttgggtggttgttgtttatcattgaactgggagctgtttgtgttatattattatgcgcttcagctccatttgcactgctgttggtactgttactggtgttattcactaaactcgctaataggtgcggtaacaaaagattctccatattattggatacggatggaggaacgctattaggggaattgctttgttcatcagtaccaacatgtggcaacagttgctgctgtaactgaacttgctgttgttgacgaaattgctgttcttgttgatgatgaagttgctgttgttgttgttgtaacatgatggcattgtcactcagatttttcttgcctaccctatcgtggaccgctgatgcaaattttgacgacgaagaatcttttcttcttcttggctgaatagggctgtaaacacagtccaatttcatgtttgtacatttcttgcaaaatggtttgccttcatcacattttactcttcttcttttacaattgtcgcaaccggtcttggacttgttatgaaacttccgtttccctgtcgaagtcttgctcactttcttgcccccaacctcaatcagttcagcatccttctctctttcttgtccagcattcccatcatcggatgtcatgttatgttagatggagatctatggataaacgaaatataaaccttaaatgaaaaaaaccgtcgacttaactcctctatattatgtaaaggcgaaatgttatttgtgcctttgaaaagtggaggtcttggttgcttctccttcgacgataatcgatttcggtgactagttagtagatgatgtaatcgtagacgcagggaacccttgcttttccccaatcgtaacaaaaaaaaacaaggggaaataaactattagatagtacgagttcgttaagttaaaaaaaaggctataaaagtcgaagaacgaatgattacgaccaacatctattgttcaaacttgccttcgttgagtttatcgaacgcgctcgtttaaatttttccgacaagaacgaggaacgagtcaccaattacgttttcggctctgtcggttgcaggatctgtaaaagcgatatagatacacacgtcagcatgaagctcttatgatttggcgagtagtgttagtacgttaaatgctacgactcggcatatactgtgctcgtttttatcagtttcatccgaggattgtagcctttttttttcatttgttgatgtttctctagtattttccgtcttgtagtggtttcgggtatgttgaacataaacattaaaaaagacgattaaataaacttgagtttgtacaaaggaaagctgtagtcatagagtatttagaaaaaaaagcagccacagtttacatgaagatgtgaccaatgaggaggcatcggtttgcctttgaatctcaatcgcttgaaaattgagttcttttcgaatgatgacacctccgagaaatggcatttctatgctagcgccactctaccctttcaaacgtccgtactcatatgaagtttcatccttcacgcagcgatctaaaaagttgtaaaaaaaaatacatttaggcctagctatatatgctactatgtatcattcagtgaaatggctgaggttatataaaatactgggaggtcgtttttacgctaaagcagaccttgcggatcttttcctgtagaatatatttgtagcataagtccaattttacgggcgcattttcaaaatcaaggtgatattgacatattttgaagagcacccaatgggctagctgcaagaacaaagagaccagaaagcctagaattaaatgccagaaaaatggaaatttattctagacaaaaattgttcggcacctctacagacgtttaacgaacctggtccggcctttgaggcgatcaaaaaaaggcccatttttgtgttccgcgtaattggtttgcgcctttccatggagcttggtgggcgacattctcaaactggtttcctgatacatcatgcacgcccgtaaagggtttaagtattgattgctagcctgaatgtttcatatgcataccgtgtctatgcaacgaatatatttcagaaaaaagcacgaaagccaaatttttgatgttaagaggtgtttttgcccgtaaacggagaagacgtggtaggactcgcaaatgtcgcgtttagcgttgaagaacatggaagtattgaacgtttggggcttgacggctcgacttttttgcactactccgccttgaacagacggatgatcctggcgcaagaaacaaagagaatcaactctgagcaaagcgaaaaaatgaaatacaacgataataaaaggataggaaggtgtatatataagttaattttagatatagattaagaaaagatgggcatatactaatatgactacaaaattgcacattttttacttttcttgataacaggaggctccaaggcggccacgatagcttcatcgaatacattcttcaaaccgcgttgtgttagtgccgaacactcgacatattttactgctttcagttctcttgctaacctggaaccttgttctgatgtaatcggacgtaatctttgtctttgcaacttctcgatgattaccttgtcatcccttagatcaatctgcgtaccgacgaccaggcatggtacacctggacaatggtgatgtacttcagggaaccatttttctttaacgttttcaaaagagggtggggaaataacactgaaacaaaccaaaaatacatcagtagaaggatatgacaagggtctcaatcgatcgtaatcttcttgaccggccgtatcaaacaaacctaacgtatatggttcatcaccaatcatcacagtcaccgcatagttatcgaacactgttggaacatagtcggctggaaattgattcgttgtataggagattagaaggcacgttttcccaacagcaccatcaccgacaacaacacactttagcgtttgcattttgtggaagagctaatacgtttatttcttgttttataagttttgcttctctaattcgtttgttaacctatctcctcaggaaaatagaatagtataataaataacgaatataattttttgcgacaaaggaaacctattgcaaaaagtgaagaatgacagagaaggataatcagtatatctcggtacacctggaacctatttatcaaaacgctgctcttgccttttccaagaatcgcgtctatcatcgatcaatcaaccttgtttgcttttttttatcactttttcccgtatcttgtttcatttggaagggcccaatggaagcagtattacccgtattgaatgacccttgaatcgacggtggaagacatctttaatgcgatgtttagaagacaatgtgccgtatttacctgtatatgtggattatctaacagtctacaatacaaaattaggtgtaacgtagctacaacagttgatagaaataatgcaactttttttaaaaaaaaaagagaaagtgctcgaggtggggattgaacccacgacggtcgcgttgcttttaaaggcctgtttgaaaggtctttggcacagaaacttcggaaaccgaatgttgctataagcacgaagctctaaccactgagctacacgagcattttcgaaagagacgtaaattaaattgttatttataccgtagatgattgtttttcacgaaattacccttttgagttccggcttgtttcgttcaacagtactaccactgataagttagcttcattattggaagaaggttgataaatgaaagaagattcacgactatgcacggcaactggtaagtaatacacgggcccagatatttattttaattcttggaaagaaagtataaatttataggttcgctatcagtaagtatacgaatttcaaactacgtcatatataatatccaaaagaagatgaaggcgatgcggtcactctaggactacaacttatccatcgcctcatttagtgcattcaccgcaatgtatacatctgaaaatgtattatataagggagcaggagccaatctaattacgtttggtcttcttgcatcgccaatgacaccatggtcatgcaaatattggaaaactttgggcataatatcctcttttccagtgtcagaatcgaagtaaagtgacaattgggcgccatgttcttcatctgtgcttgttggagttaatattgtaaaaaaacatggtaatttctcgatccttaaagggtgtttgtaatacttggaggcttccaacagttccgtcatatagttcgtcagcaacaacgatcttttacgaacttcattaataccattaaacttcgcaaataattccaatgaacttctcaatgccactgtgtcaataacgcttggattagattgcctgaatcccaatgctcctggaatcggctcgaatacttccagcatttgaaatcgcttagcaggatcattgccccaccaaccagctaatcttggcaaactttccttagcagggtctggtttagtatgcttcgagtggacaaataagccaccaattccaccaggcccggcattcaagtacttgtaagaacaccaacaggcaaagtcaacaccccaatcatgaagttgcaatgggacgttccctacagcgtgtgctaaatcccatccaaccaatatgtcggggaattggtgggcaaatgaggtgattcggccaatatcgaaatattgccccgtgtaatactgaacacctgacaaacagaccagcgccaattcatcttgatttacctctatggtatccaggatatcttgagttctgatataagtctctccctcgcgtggctcgatctgaataaaaacattctcaggttccgaaattccatgaattttgcactggttgtagaaagcataatagtctgatggaaaggagcccttttcaaaaaggatcttgaatcttttctcagtaggtttataaaacgtaattaacaatgaattcaaatttgcagtgagactattcattactgcaacttcattttcttgagcacccacgatgggggctagtagtggaagaataggtaagtcaatgctgacccaaggcacctttcctctggcttcttcaggatgtttgaaatgcgattccacagcacaatcgctccacgcatctagctcagcattaattgaattcctagttgacttcggcatcaaacctaaagaattcccgcataagtacgtcacaggcttatcgtcggacgatagtcccatggatttaaatgtagggatgttgaattcatccctcagagattccggatattctccgtctaattccaaagctttctccataattaccagtttgtttcttttttccacagaatatttaggcttaatatgtacgtattgacagcatatatatttgctgtcttgaatttattatgctaataaataattatgtttttcaagcgcagtcacctatttccaaagcgatgggtttgtccgtgccgtagacggcatcccgtcgttttaataaccgttataaaaaccgcccccatattttcgtgggttgacgacgacaggcgtggacgacgttaattgacgtcgtcataatatatttcatattatgattttttccctcaccattacttgttctctcaagtaggagtatctggcacttggacggtgatgtcctcatcagcatcaattgcttcgtctggatatgagagaaaatcagaggatagtgggccagtgatagtttttctccctcgtgaagcagcatgttttaccaactcagaagaaacgccatctttttctgggagcggagacaatttttttgttctccggacatttgcaaattgtttttccagttctgtcacagctattttcccggctcttttgcgctgttgttcatctcttttggcctcaacttttctcgaagagactactctttcctgttgtgtttttacatttattttggaggaaatttccgataatgctatttggcgttttattttaatatttgggcttattaaatcaaacttatatttgctggcattccatatgacgccggtgtcatttttctctaaaaatttcatgccagaaaatattattgatctaattcgcagaacacattcttcttttggagaaagcactttagtcaatgtagggcatccaattatattattaatcatgtcgggagaatcatacacataatcgtcattaaaatctgttagtgcaaagttaatgcaagaaaattccctgaaaataatatcttctctaaaaagatagcttcttttcggcctgtggctatatatatttcctgaacaattcagtggactatttatcaagtcgttcagcaacaaggcgaatgaagtgcaaaacttcctgtgtctgtgagtgtactgcaaaatagatctatatgacttaatccagcacataagcaaacgaataatggctagatatcgaaagtcttccatgtttttttgccaggagggtttgatgacgacgtctatgatattagcaataaaatcaaagctcaagtctaaaaaaaaaacctggcgctcactcaaatctgcatatttgagtttgttcttttgttccttactttttcgagttgtaaacataagatcgaaacttcccattgtggcagccaagttttcaagtataacattaatattacctgaatgatactttaatgcagccatttgtaaatgctctttcaataaccaacaattagaagcacgtgatgcgttccatgactgtggaaccaaagtgtgttctactatcgatagaaattgcaaaacaatttgaccttcaaagaatgatttctcacctttgagatcttttgacacaagaattgccaattttttcatcagacgtcttctttccggaaaatcaggagtcaaaatgaaatctttcaaattgtttaacgcacatttagacggaatccttaccaatgctcctcttactaattcaaagaaatacagtgagaatttcccagtgatcaagtaaattttcgctcgttgaaaataagtatctccaacggctgggagatagagtgaggcaatattcaagtacctaatagacttctcaaaaccttccacactcttgggtttgttagacggcttgtttagtagtgttttataaaaatgtgtggaacctagattaatcacgcatctttgtagtgagattacaatggaaaacgtcagtggattactcgtgtttaagataattttctcatgagttgaaagtccatctgtgtattgcattaaattcaacttcgcgaagagagcatttgaaataacggaattcatatcgtactttgcgcataggtgttcgatgatgtcatagtaatacctgtgtgtaattttgaaaaattgaatcatttttttttgaaaaattctaaaaactctgaactttcttctgttacttagtcgcatgatatcatggaaccagtgctcaaaccattggagtgtaggttcgtgaatttgaagccataaaagtttcagaaccaatggtatcacggaatcatttatgcgttcgtaattgttattatggtacatattttcttgtttcaaaagtagctcttcgagaaacctagtagatttgcgatgtattccatccaggaagcatctgaacgtgatatatgcattttcatcgcatgtcaaccttgatgttagatgtttatccagatgcgcacgagcgttcttgaaaaataatctcatacattcttcgttaacttcttcattatccattatctatggtggcatgtgtcatttaatggaatatactttttcccctgataagtttgctaaaaacggtcggatcatacaggcatgttaacatttccattatcctttttgacattggataatggcgtgaacgcgaaaatcacattgataaaaaaaagcagtttggcgaattagtaactgtcaataaagagggcatcgcttttgaaagcaccttcgtctgtgcgctcgcttcagctacgtaaaggtgtattatagacaataatgaaagtgctatgtgtcgcagagaaaaattctatagcgaaggcagtttcacagatcctaggaggaggcagatcaacttcaagggattccggctacatgtatgtaaagaactatgatttcatgtttagtgggttcccgtttgccagaaatggggctaactgcgaagttaccatgactagtgttgcagggcacctaacaggcattgatttcagccatgattcgcatgggtggggaaaatgcgccatccaagagttatttgatgcgccactgaacgagattatgaataacaaccaaaaaaagatagcaagcaacatcaagcgagaagcgaggaatgcagactatctgatgatatggacagattgcgaccgggaaggagagtacatcggttgggagatatggcaggaggccaagagaggcaacaggctcatacaaaatgatcaagtataccgggcagtcttttcgcatctcgaaagacaacacatattaaatgcagcacgaaacccaagtcgattggatatgaagagtgtgcacgctgtaggcacgcggattgaaatcgatcttcgagcaggtgttacattcaccagactcttaacagaaacgctacgaaataaactgagaaaccaagccaccatgaccaaggatggtgcaaaacaccgcggtggtaacaagaacgactcacaagtcgtatcgtatggtacatgccagtttccaacgctcggctttgtagtagacaggtttgaaagaatacgaaattttgttcccgaagagttctggtatatccaattggtagtcgaaaacaaagacaacggcggaacaacaacgttccagtgggacaggggccacttgttcgaccggctgagcgtgttaacgttttacgagacatgcatcgaaaccgccggcaatgttgctcaagtagtagacttgaaatcaaagccaacaacgaaatacagacctttacctctgaccacagtggagctacaaaaaaactgcgcccggtacctgcgtctgaacgccaaacaatcactagacgcagcagaaaagctataccaaaaggggttcatatcgtatccaagaacagagactgatactttcccacacgcaatggacctaaaatccttggtcgaaaagcaagctcaattggaccaactcgctgcaggcggcagaaccgcctgggcatcgtacgcggcatcgctgctccaacccgaaaacacaagtaacaataacaagttcaagtttccacgaagcggctcccatgacgacaaagcgcatccaccaatccaccccatcgtaagtctggggcctgaagcaaatgtttcgccagtggaaagaagagtatacgagtacgtggccaggcactttttggcatgctgctcagaggacgccaagggccaatcgatgacccttgtgttggactgggccgttgaacgtttctcagcttcaggtctcgtagtcctagagagaaatttcctcgatgtttacccttgggcccgatgggaaaccaccaagcagttaccgcggcttgaaatgaatgccctcgtagacatcgcgaaggccgaaatgaaggcgggcactacggcgccgcccaagccgatgactgagagtgaactcattctcctcatggatacaaacggcattggcacagacgccaccattgcggagcacatagacaagatccaagtacgtaattacgttaggagcgagaaagtaggcaaggaaacctacttacaacccacgaccctgggtgtctcactagtgcacggcttcgaggccatcggcctcgaagactcctttgcaaagcccttccagcgcagagaaatggagcaagacctcaagaaaatctgcgaaggtcatgcctccaagactgatgttgtaaaggacatagtcgagaagtataggaagtactggcacaagacgaatgcctgcaagaatactctcttgcaagtttatgaccgtgtcaaggcatccatgtaaggcgtttttgccgccctttgtcttcaaaaaagctctccgcttaattgcatgattcagctgactgcatatgtgcattttcagtaccagccgcaactgcatcaaaccatgcagaagtcgccgccacagaagctccagcgcgccgcgtaaacgcatgttggaaggcgccccaattagcatattcacgcgcgactaccaaacgcatagggaaggtttcagagagccgatgagcagcggatgcacagagtacggccataaggctgcaaagcgcttggcaggaatgggcgttttctagaggttgccttattgatttatatggaagaggagaggattcatcgatcgggcttctaaggcaaatagtatgcatacctttttcgggtagttgaagagaaaagaggaagagaatagaaaaaaaaaaaaagcgaaatttttacatcctctattgtaatgtaatttctttttttttattaggtatatatgtgagatacaattctcgaagtcatcgggaagctttaccatttcatttcctattccagaactcatattagcatctattgttctgagattcatcgcaacatcatttaaaggactgtagagccaattgcattatatcaatatgagtttcggtagtaaagtctccagggctttgagatttttggaaattcctgtcaaagacagggcatctgtgagtttcttgaagaacccggatttgcaacctattaagtcggctaaccaaacatgggggttctggtctaattttgcatattggggtgttatgtccttttcagtgggtacatggatgagtgcctcttctgcactaggtgttggattaagttacccagaaaccattggtacatttatcgtcggtgatgtgttgaccattattttcacattggcaaactcgtgtcctggttacgactggaaggtcggtttcactttggcccaaagattcgtctttggtatttacggttctgccttcggtatcatcatcagaattttgatgagtattgtcaactacgggtccaacgcttgggtgggaggtctttgtatcaatatgatcttggattcatggtctcaccattatttgcacctgccaaacaccttatcttcgaaagttgccatgaccactaaagaattaattggttttatcatcttccacgtccttactgcattctgttacttaatgaaaccctaccacatgaactacattttaatttggtcgtgtgttgctacatttttctctatgttgggtatggtgatctatttagctaaacaggctcacggtgttggagaattgtttacctccactaaatccactgccactggctccaccaaagcttgggcttgggtttatatgatctcgtactggttcggttccgtttctccaggttccaccaaccaaagtgattactcgagatttggttcctccaattgggctatctgggccggtaccatctgtgcattgttaattccaaccactttaatcccagtttttggtgttattggtgcctccacctgtgacaaactatacggtgaacaatattggatgcctatggatatcttcaaccattggttgacaactaactattctgcaggtgctcgtgccggtgcgttcttctgtggtctttcatttgtcctatctcaaatgtcctacaccatctccaactgtgggtttgccagtggtatggatttggccggtttattacccaagtatgtcgacatcaagaggggtgccctttttgccgcatgtgtctcctgggcttgtttgccatggaacttctacaactcttcttctactttcttgactgtcatgagttctttcggtgttgtcatgactcctatcatttctgtcatgatttgcgataacttcttgatcagaaaaagacaatactccatcactaatgcctttattctcaagggtgaatactatttcactaagggtgttaactggagagctattgttgcctgggtttgtggtatgacccccggtctacctggtattgcttgggaagtcaataatgactatttccacaacactggtattgtcaatttcttttacggtgactccttcttctcgtttttgatctcctttttcgtctattggggactatgcctcctcttcccattcaaaattactgtcaaacatgatgacaaagattattatggtgcctttactgacgaagaagcaagaaagaagggcatggttccatacagtgaaatttctgaagaagaaatccgcgcttacacattaggcgaaggttacactaccggccacgagtacagacctgaaggctccgacgatgaaatacctgagttggtcaaaactagctctgaaaacaccaatgagtttgaaatagttcatcataagaataatgaaaagcaatcctccaccgccagtgaaaaagctgcttagtgggaaataaaattgcaaaaaataattaagaataaaatttccctttcatttaatggctctctgcactaatttttttacctacgaaattttccttcgttcacacttaatattaaataacagctctttcctaataataacatatacactagatatataataccaaataaattaaaaaaaaagaaaaacaaaaaataacgtagctttgttacagtcgtaaaaaaaagaacaataaaccaatcttattgccagcgtctaactagtcctattatattccaatatattaaggggtaaggactactattattcgccctgaattgaaatcttttagaaagcacctgttctctctctggtgttctttttttctcatctattatctaatttcttcaaccttcgttatttgttgttattccgtaatcgtggtgctcaacttttgaaatttcacttgtttaccataacggaacataattaaaaatttgttcttgaaagtcacaagcactacgtgaacacaaaattaaggcaagagtgacaaagtaaccctcacaaggagcctgtcgttggttatattggaagctatagatataatcgaatccaatgactggtcctggacctgaaataaataaggaggagcaccccagttctccgggcaagaaacagataacatataatagtatacccaagaatgcaaatctaattgatggatctacgaattcatcgaagaggccaattgaaaagtatgacaagagaatagccgacccaacaaaaagctattttccacatagcatatcaagaacaccaaggagaaaatatacttacattctagtcctcacatcactaaatggaacttttgagagcaaacatgtggtgataccatttaaaccagatggtttgaaattgggaaggcctgttgctaatagtaatagcagctccagttcatcgctcaggggcggtaaaagagtggattcacacactttttcccaagtaaggtccgataatggtaatttcgattcaagagtactctccaggaatcatgcattgttaagttgcgacccgctcacgggtaaggtatatatacgagacttaaaatccagtaatggtacgttcattaacggtcaaagaattggctcaaatgacgtagaaatcaaagttggcgatgtgatagacttgggaacagatatagatacgaaaattgagcatcgaaaaataagtgccacagttgaagaactatttgtacaacctttattagaatcaccgatttttgaaaatgaagatagtgatgattgccatacaattacagaaaaagaggaggctgctgccataacaagtcacatatatggtgattccaacaacctagaattggaagaagttatcctgggctctgatacagaaatactgagtggaatttttattaataattgtattggtacgagcccgactttatctaatatcatcaaaaccctggcaatggaaattccattttccaaatgcgataattttaaattacagtcgatggagaatttcttaattaattatacgacacatctagaatacacgaacaaacttttagtggaaaaaaatgatcagcaactggtaaagctgcaaaatggattaagaaggaaactgtcggggaaatacgaaaagattatcgaacaaaacagaaatcaagtaaaacagttggaaagggaccatatgtttttcaaaaagtcatttgaagtgaagaaaagaagaaataatgaaaagcaaaaaagcatggaaagggaaatagaagacttgaaaactaggttagaagtggaacgatataagaattcacaaatgatgaagaagaacaaacagaaagaacaagaactctcaactgcatctaaaaaaaagactaccgaacatgacactagaggcgtcccgggcatgaatcctaagggtactgacaaatttagcatcaagaacacgctatgtaatcatttcacactattaacatttggaactatttccatcgggattatagctattgtcttcaagatcctttcccccaactagcatcgtaaatacaagacacacacgatccgcttttcacgtcagagattattatatacgtacgtatatatgtaatagatattcacatgtaaaaaaaggtaagcatcctttcatttaagaaagtatggggggagtcatccgtctcacggattctttttcaaaatattgacgtcgtcaatttgcattctttccaaagtttttattcctagcagctttgtcatttctttgacaaaactaattgctacactttgcacatttacaacagcatcgggtcgttgttccataattgaagtagtcagtgtatttttcaaaccgcacatttcaaaactattcatatacgatagatctgtattaacattaattgctaccccgtgcgatgttatggaacgtctgacgtgtattccaacactagcaactttcttcttgccattttcaacccaaactccagtgtcctttgtagtcatagcatctaagttcaaaggcttgtcagtgtcgtcgcacatcttggtattcttcaacgttctgatagtggcctgctcaatgcatgaaaccaagcatttagcagggaaactttgaaatgttttcaaatctaaaataatgtaaataacaatttggcctggaccatgaaatgttacttgtccacccctttccacttgaacaaactttggtcgtgggttgtccttttgcgtttctggaatgaaactttcataagccgctatctgatctggcgtcatagttttcttaatcctcttcccacctgtataagttggctcaaactcaaacgttaatattatcggattaggtttcattgccataaccttgtctaatattcttttttcgttatcatttattgttgcagtgcccttatattcttcatccaattgtattaattttctctcaatcttcgattgaatgtctttgatgtccaaatttgccctaactaatgtctcctgtatttccaatcctttttgaaaaggtattctttgagtgaattgtagatgtctgagcgtttgcgctgagggttttataggatgtgtcatttccttgagagcagaggcataagtgctaaagcattgtcgcctacagacattgaagtttgtgcatacggactggcgaatacacctcgacatggggctgaagctttcgacaaatcttaaattgtgactttgtgcatgaaatttttatatgaacgttttaaataagtggacatagtccttcattcggtatatgcagatccggcatcaaacactttttcaagaaagtttgagtcaaaaggattaaaggataaagtaaaacaacaataacatctccgtgaagcattgagggaagggtttaactccaacaatgtcactgaacaacataacattctgtgtctcacaggatctggatgttcccctgaaagtgaaaatcaagtcattggaaggacataagccactgttgaagccatctcaaaaaatcctgaaccctgaattaatgctgatagggtcaaatgtattcccttctagtgatctaattgtatccttacaggtatttgataaagagagaaacagaaatttaactcttccgatatacacgccgtatattcctttcagaaactctagaacctgggattattggttgactttgcccatacgtatcaaacagcttacctttagcagtcatttacgcattattttgtgggaatacaatggatccaagcaaattccctttttcaatctagaaacgagcatctttaacttaaaagactgtactttaaaaagagggtttgaatccttaaaatttcgttatgatgtgattgaccactgtgaagtggtcactgataacaaagatcaagaaaatttgaataaatattttcagggtgaattcacgagactcccttggcttgacgaaatcactataagcaaattaaggaaacaacgggaaaataggacttggcctcagggcacctttgtcttaaacttagaatttccaatgttagagcttcctgttgtgttcatcgaaagggaaattatgaatactcaaatgaatattccaactttgaagaacaatcctggactaagcacagacttacgagaaccgaataggaatgatcctcaaatcaaaatttctttgggggacaaatatcactccacattgaagttttacgatcctgaccaaccaaacaatgatccaatagaggaaaagtataggagattggaaagagcatctaaaaatgcaaacttggacaagcaagtgaagccggacattaaaaagagggactacttgaataaaatcatcaactacccccctggcactaaattaacagcacatgaaaagggttcaatatggaaatataggtattatttgatgaacaataaaaaagctcttacaaagttattacagagtacaaatttgagagaagaatcggaaagagtagaggttttagaactaatggactcatgggcagaaattgatatagacgacgcattagaactattaggctcaacttttaaaaacctttcagtgagatcgtacgccgtaaataggctgaagaaggcatcagacaaggagctggaattgtacttattacagttggtagaagctgtctgttttgagaacctgtccactttttccgacaaatctaacagtgaattcactattgtggatgccgtatcttcgcaaaagctttcgggtgattctatgttactatctacatcgcatgccaaccaaaaattattaaagtccatctcgagtgaatcggaaacttccgggacagaatcgctaccaatcgtcatttctcccttggctgagtttttgattaggagagcactggtcaacccaaggttaggaagttttttctattggtatttaaagtccgagtctgaggacaagccatatttagaccagattttaagttccttttggagtagactggataaaaaatctcggaatatactgaacgatcaagtcaggctaataaatgtgctcagggaatgttgtgaaacaattaagaggctgaaagatactacagccaaaaagatggaattactagtgcatttattggagacgaaagtcaggcctcttgtcaaagtacgaccaattgctttaccactagaccctgatgtgttgatatgcgacgtttgtcctgaaacttcgaaggtatttaaaagctctttatcgccactaaaaataacattcaaaacgaccttaaaccaaccatatcacttaatgtttaaggttggcgatgatttgagacaagatcaactggtagtacagatcataagtttaatgaatgagttattaaaaaatgaaaacgtggacttgaaattgacaccatacaaaattttggcaacaggaccacaagaaggtgccattgaatttatccctaatgacacattagctagcatactaagcaaatatcacggtattcttggctaccttaaactccactatcctgatgagaacgcgacattaggcgtacaaggctgggttttagataattttgtcaaatcttgtgctggctattgtgttattacatacatcttaggtgtcggcgataggcatttagacaacttactagtcacgccagatgggcacttttttcacgcagactttggttatatcttgggtcaggaccccaaaccttttccgccattaatgaaattgccccctcaaattatagaggcgtttgggggtgcagaatcatcaaattatgataaatttcgcagctactgttttgtggcatattcgattttaagaaggaatgcaggcttaatcttaaacctgtttgaattaatgaagacttcgaacatacctgatatcagaatagatcccaatggtgctatattacgtgtaagagagagatttaatttgaatatgtccgaagaagatgccacagtgcattttcagaatctaatcaatgatagtgtaaatgctttgctgcctatcgtgattgatcatttacataatctggcacaatactggcggacctgattggttgataattggtgcttcaaaatttaaatttcgtcactctaattatacttaacatataaatggtaccttcaatatatcttcttagtaaaaagtagcatgattttgtgttaatttgcactttttttatttaaaaataaaaatcacagttaatttttcatgatcttgcaaagacacgcctccccctaatgtggcatatataacaattgtgaatcagaaaaactcaacactttaacataatggcgggcacgaaggctaaacaaacaagattagcattgaatgccttttttgggtacaatagaacagtactgaatgacatcatatatcgaaaggctcaagtcggcagcatcgtatcttgatacagttccagatgagcatcatgatttcagaaaacccaccgccaaggttgtaacgacgcaactgactattgctacttcactaggtatttttgctttgctttcgttctcaattctactaaaaaagtggcctagattatacgcaagcagacgatataaagatgacgggaaccttcgcttaccgtcctggaatcagtcaagtttattcggctggttaacagtgttgtataagatacgggacgaacagattctggaatatgcaggtttagatgcgtatgtgtttttgagttttttcaaaatgtgcatcaaattactttctattttttgtttcttctctgtgtgcgttatatctccagtaagatatcattttactggaaaaattgatgacggcaacgatgatgatgacagtgaaagttctttaatacatctggtaaaaagaattgtggagggaagtggcgatggtgacaatcattcagctcccgaacgtacaaatgtgtacctctggatgtatgttctcttcacatatttcttcaccttcatagcaattaaaatggcagttgcggaaacaaagcacgtcgtaagtactaggcaagcttatcttgggaagcaaaatacgattactgatagaacgataaggctctcaggcatcccgatagagcttcgtgattcggaagccttaaagaccagaattgaacaattaaaaatcggcaccgtttcatcaatcactatttgtcgagagtggggtcctttgaacaagctatttcattgtcggaagaaaatactcaaaaacctggaattaaaatattcagaatgtccaagggagctccgtactcgacaaccatattcggagaactatcatttattgggaaacgagcaatcaggcgcagttacacatggagaaaatgttccatcaagcaataataatgacgaggatactatactatattctcaaatttctcttggagagagaccaaaaatgaaaattggatatcgtggtatctttgggaaggaagtagatgccatagagtacctggagcagcaattaaaatttattgatgctgaaattattgaagcgaggaaacaacactactccgcaacacctacggcattcgttacgatggattctgttgctaatgcgcaaatggcagctcaggcggtattagatcctagagtacattacttcataaccagattggctcctgcacctcacgatatcaagtgggatcatgtttgtctttctagaaaggaccggttaacaaaagtttattctactaccgtatttataggcctttcaagtttgtttttagtcattcctgtatcatacttagccacattgctaaatttgaaaacactttcgaaattctggccaagcgtagggcagctactaaaagatcaccagtgggccgctaacattgtaacggggctattaccaacctatctcttcacattgcttaactttggaatcccctatttttacgagtatttgacttcttatcaaggattggtatcatacagcgaagaggaaatctcacttgtttcaaaaaatttcttttatatttttgtcaaccttttcttagttttcacattggcaggtacagcatctaattactgggcgtacctcagcgataccaccaaaattgcttatcaacttgctacatctgtgaaggagttctccttattctatgtcgatttgattatattgcaaggtattggtatgttcccgtttaagttgttattagttggtagtttgatcggctttcctctagtgaaaatcaaggctaagacacctaggcaacggaatgaactttacaatccaccgatatttaactttggactacaattaccacagccaattctgattttgattataacgttgatctacagtgtaatgagcacgaaaattttgacttcagggctggcgtactttattattgggttttacgtctataaatatcaattgatttttgccacagatcatttgccccattctacaggaaaagtatggccattaatttttagaagaatcatcgttggattgctattgtttcaattaacaatgacaggaacactggcaggattcgaaggaggatgggttttgtcatcttgccttttcccgcttccagtagtgacattatgtttcctatatgatttcgagaagaactatttgccgttgtcaaaatatatcgcattgagttcaattcgcgagtacgaaagagacaattctacggtgaattctgccaatgaggaagagtcgtatgcatacccttacgctgtgagtgaattagagggtccgatgttggattgaaatcccaaggtgctatttctatatttatatattttgttgtgaaaatgccaaaataagatttttgatacaagtaatactggatatttttttatttgcttataacaataaataagttcctgacttctgtagtagtagtataaactcctgatgtattaaattcttaataactgaaaagttaaactttgccacgaaaactataagtattggcttaaccatgaaatatcgtaataaagacacacttataaaaatctttatgatattccaataggaaagattagttacaatcttcaacgattcaataatatagagattagctacccacttaatgatactcatcgaaattagagtatcataaggccatatcaacatcaatatcggaaaaattttggcaccgtacgataataagatcgtatatgatatgacatcctttgaagaaacggaatagtgcttccaatgcaactttttcagtatgaaatactgggtaaaggtgtggaataaagaaacgtcaagaatacaataacttgcaaagtaaagatattgtattggtgggctccaggtaaacactttacttgtaatggtattgcgcatgattgccgagtcccatttgaagctctctggtaatttttttgaaagcatgatgagcttaccatcattattgttacggttcaaatagtagatgtatttactctcctcagtaacccaagttaaataaatctcgaatgataatagtagaagccaaaggcgatttaaccggtcatatttacaaaaccagttctttacgttaaataacaaagcttgcgtatagtcacgcaaacactggcaatcatttagcgcttttcttttcggatattttgagagatgcaattccaaagcattgaataccaagtgtctatatgcacctgcttttaatagaagcaaatcaatgaataacaggacattatctatctcaacatatttgtctactgtctcttggcaatatggacaatctgtcagctgaatgtggtcattcgagtacactgtataaagggaatctacgggccgcatgcacgttatgcaaatcatcgtttatcacagctaatatctactttttgatgcgcttcatccgttcactgacgcaccaaaccttccttctatgcaatgacaagaatttctcagcttgatttatgccattgatgtttctgaatcatcaattgttcacatagggctattcaatttggcccgctgtccctaaactgaaaaaatactaagaaaaattttgcaaaaaatctaaaatgatgaggtgaaagatcaaaaaagaaagatcaataattaagaggttggcaagtcatcctgatcgtgaaaaaaacttaacaagtacaaatagagtaatcagcattggaaaatgtctcgcgttggtgtcatggtattaggacctgcaggtgcggggaaaagcacattttgtaattccattatatcacatatgcaaactgtaggacgaagagctcatattgtaaatttagaccctgccgcagaagctaccaagtatgaatttactattgacattagagatttaatttccttagatgatgtcatggaagaaatggatttgggccccaatggtgcgctaatatattgcttcgaatatcttttgaaaaatctagactggcttgacgaagagatcggggatttcaacgatgaatatttaatctttgactgtcccggtcaaattgaactctacacgcatatccctgtcttaccgaacatagtgcgccatttaactcaacaactgaatttcaacctttgcgccacatatcttttggaagcgccatttgtgatagatagctcaaaattttttagcggtgcactatctgctatgtctgcgatgattctattggaactaccccatatcaatgtgttgagcaaactagacttgataaaaggcgacatcaataagaaaaaactgaaaagatttttgaatcccgatgcaatgttattaatggaaacggaaggaatgaatcaagcatccaaccctaaatttctaagactgaaccagtgcatagccaacctcgtcgatgatttcggtatggttcaatttttacctttggaatctaataatcctgacagtatagaaaccatattatcgtatgtcgatgatataacacaatgggcagaaggacaagaacagaaagagcctaacgaccaaatagatgtcgaagaatagttatagagaaaattatgtacgcttgattcatataaaaagaggtaaaaaaaaaaaatagcttctcataataaccaattcggactcgggaaagtacaagttcaagttttttattggtttctatatgtataagataaaaatacctagatctatttaattctctgtcttgggccacctggtgatttcttattcctggctgttaggatttcaacaccatgttcggtaaccaacagtgtatgttcaaattgagcactcagtttaccgtcttgggtggtagaagtccagtcatcaggccaggtcatatccttccaagtaccttcattaatcataggttcgatggtgaaaaccatacctggtttcataacaccaggtgttctattcttggcgtagtggggaatatttggggaacaatggaaaaattcaccaacaccatgtccacaataagttcttactacactgcacttattttcggtagcgtgtttttcaatatgatcacctaactcttggaaggtggtacctggcttacacattttaatggctagtttcaaacattctcttgaggtctcagtagtattaagagcttccttagaaatgttttcgccgacataatatgtctcattcaagtctgcatgataaccttggtagtataaggaaacatctaaattgacaatatcaccttccttcaagacagttttatcgggcacaccgtgacaaataacttcattgacagaggtacaaagcgatttaggaaagttgtaataattaagaggggaagggtaggcacctctcttaattgtttcattgtggacgatttcatctaattcatctgtagtgatgcctggtctgacatgggcagcggcaatatcaagaacttctctacccaacatacatgcctttctaatcttcttaatttgatctttcttgtatatagggatgttgttaagtctatcatttctttgttcactgactggtagcccattagcggcccagtccggtttaggaatatcttcagggacataccttcttggggtaagtggatatgaagccttcactttaccagaatatttgaattttgggaaaggatcataagcaccttccaagccgtccttagcattgtgcaaagctttgtgagctttgtagttgttttcataacagcttgtgtcgcagaaaatggaaacgatgccttgttttagacaaacagggcatttcatttgggacgaagtttctctaccacattgcaaaccggagcaatatatcttggtaggatgagaagcctgatcggaggtagtaactgttgtagttgcagtgctcattatacaatttttttgcttatttttttcttgctaggaatatacacaatagcgttcttgggatgaataataataatatcagtttttcttctttatatgaaaaatgaaaaaaaaaaaaaataagtaaaaaattttcgctttcttttcggggagcagccaaataaagattgctgctagtttaaatgagatggaccaaaagccatgggcagcagttctcccattgtcatgactttagaacgagaacctgtggaattaagcatgactattggaaagtccttgaccacaaattcattgataaactgcctgcaaacgccgcaaggggaaacacactggtcctcagaatcgccacaaatgaccatgcatttccatcctgagcgatggcctgccattagaacttgtatcatagcagatcgttctgcacatatacaattactgtagcttgcattctcgacattagcaccagtgaagataacatcgttatttgttaatatggaacaaccgacacggaagtgagaataggggctataggagagttcacacgccttcagtgccgccctttttaaggcttccagttgtctgtcttctatgccacctactttcattaccttatttctctgcttgagattctctgtttggttttcctagtttcttgtacataaacagtttgtgtttattttgtcaaactactcggaaattggcgagcagcgccttatcaagattacagtttgcaaatataaaaatgtaaaggaaagaaagcgtaaggtaacaagaagagaaacggggaagataatggccttggtctctagaaggtcgacaagatcggaaagcacctcaataacaaaggaagagcatacaggagaaggttcattgacgaagttgttcttccgatggcttgttaccttggagggtgatcaggatataaacgatggaaaaggttatatatcgttaccgaatgtctcgaattatatattcttccttggtggcaggttcaggacagtaaagggcgccaaaccgttgtggttaggtgttctccttgctattgtatgtcccatggttctcttctccatatttgaggctcacaaattgtggcatacccaaaatggttataaagtgctggtcattttcttctattatttttgggtcataacgctagcatcctttatcagaacagccactagtgatcctggcgttcttccgagaaatattcatttaagtcaactaagaaataattatcagatcccgcaagaatattacaacttgataacactaccaacacattcttcaatttcaaaagacattactatcaagtattgtccatcatgtaggatatggagaccacctcggtcttctcactgttccacatgtaacgtctgcgtaatggttcatgaccaccattgcatatgggtcaataattgcataggaaaaaggaactaccggttctttttaatattcctgttaggtgcaatactttcgtccgtcatattattaactaattgtgccatccatattgcacgggaatcaggggggcctcgcgattgtcccgttgcaatattgttactttgctatgcagggctaaccttatggtatccggcaatactgtttacttatcacatatttatggcaggtaatcagcaaacaacaagggaatttttgaaaggtattggatcgaaaaaaaaccctgtattccatcgtgtggtcaaggaggaaaacatatataataaggggtcctttttgaaaaatatgggtcacttgatgttagaaccaaggggcccaagctttgtaagtgccagaaagccacatgaagctggagattggagatttatggatttatcgccagcacacagctttgaaaaaatacagaaaatataaggaagtatagatataaagaactcagcgacacagtagtacgtaaaatataaaaaggttactgaaaggagtgaattccgccatagtataggttgagtatacgcaaataaacgttggaaattggctagaatgttaaaaaaaacattcattaaaaggttcttttcgtataacttttacaacaaataagtggttgtttggccgagcggtctaaggcgcctgattcaagaaaatatcttgactgcagttaactgtaggaatactcaggtatcgtaagatgcaagagttcgaatctcttagcaaccattatttttgccttccgaaaattttgaagctacatattagcactcttcttcagatgtcagacaacgtgcagcatctttttttcctaccattgaatatatatatagtaattacggcaaccgtttatataaaaattcaaaagattaaatattttaatatattagtgtctggtttaaaagtcatacttctctaatcactaccgtgaaaaaagcagttccataagtgttcattactgacttcttggtctaccacgcttatctcaaacttcgcatcatcgctttcctcattatccgtttcatcttgtgcttcgtcgtatttatcgcctttttttgacttctcctttcttttgcgctcttcgagtatacatttatatctgaggatgttttcttcaacggtatttctgatcatgaaattccacacaaaagtttcttcatcttgtcctatacgattattccttcccatagcttgtaattcatcactattattaaggataggatctagtaggaaaatatgttttgcatttatcaaattcaggccggcacctaaagttttcacattcaaaagtaggcaagtgacggaaggctggcgtttgaagttatttatagtttcgccaacattggctgtattagatagacatgccaagtgttcaatgtgatacaactttaataccttaccaatgacctttaaatattctgtcttttgagagtatagaataacttgtggcggatcagcgttttcctgctcactttttagcctcaggtaagatattaacttgatgacgaaatcaatcttagcaccaaaactttcctttatgtgaatttgatggacttcattaatttgatggaattgctcgtatttatttccgaataatttttctacttcactcatattggatataatcgagttttcatttgaattatcttgagacgaatcggcgccctctcttcgtggctcttgaatttctttttccctcttctccgttgagttcttgaacttaaagttatagacttccgatatactacagaaacctttgcatatagggcatttactatgggctcgtagccacgtaaggatacaactcttgcaaaaataatgtccacacttaatgatagcacctatttcaacttctcccaaacagatagagcagctcaatatttgattatcgtttaatgtgtctttcaatctggacaaattttttaaatatatcagccgtgattcaatgttattgatttttgcatctagtgtaccgcccaatgacttattgatagttcttattagatggctgagttgtggagcactcaaagagtgcaaggacaccaatgaatcggaaatcctctgtaattgactataatattccgtcttggcattataaatcgatcccaggattttcaaagattctcttacctgtttattgtacttaaacaggcttttactttcaacttcgtactgaagtaagtagtcctcaaaattttgaatggtagattcactttcattgcttgaggatatccgtcttactatcctgctgttcttcagttcatcaaaaacagttcgtagaggtgttcctgaaatcaagcgcaagctgttcaataactgcttttgatattttgaaattattgaaccttccggtaccaaatgcttcggaattttaacttctgattctgaagttaaaatattgtccctattctgtaaaattatctccaagcaaccaagaagactgaatatcttatcttgactgtcaatcgatgttgaatattcttcattaccgataattttattagtgctatcatcgtcctctgtcctgtggacaggttcatagataataatgagtaactcatccaataactcgttgaagtttttagtttgttcattcaacccttctatcaacttactcaaagacttgaaacaacgagatactgctaaattagatgagtagtcatttttgtggtcaaattcaatattgattaatcgcaaaggtatattgctcgtcataggagcaaacttagttctggccattttaatagtcatatcaacttttctagcctcagaggagaggattgacttcctcaaaatttctgcattcgcataattttcttgttctaaaagtctattctcttcaatttcctctaactcattttttggaaaaacatcagaatacaccacttcttcagtcttctcttttcgatgcttgtcgtccgcctcttctagcttacgagtgcccaagttatagtaaacagaaccgaggaagaagtagcaatcatgcagtaaattcatcatagcacgtaatcctttcttcttcaggtggttggataacattccgtcattgttgtgattatcatggtttttagcaccatttatttctctatcgctttcgtcgcctgaagatgtttccttctcaccaaacctctcgtccatatgttcgtcctcatcttcactgaggtttaacgacttatcaaacggatcctcaacgttgaatttttggcgtatgtgtatcatcaaatcatctctgattttgataaatgattcaagggctttggccggagtattggaaatttcaagttcatactgtgcctgcttgatcgataaatggaatctctctctgtaatagccaattaaactgtcaaatgcatccattcgcatggatattaagatatcgtctatatttgaaattcttgacaagtgcccgtgaaggcgcttctgtcgggtacttaaaatttctggaaataatgcatggcaacatatatatcgcagcctagacaaccattcgtttaaaaaggcattgcttacacggggtgatccactgccatccgaattatagccactcaactctaaaaaattgttccaaagatttaaatagttgtcccactcgataggcgcaaactccaggggaatgatgaagttgtgttgccgcggaatatgaatctgagacgcaacattggctttcgaatgccttatgcaaagatcatacctgtaaaaaatgttcatacaatccttgatagaaaaccgaacgccctttaattggcatacaaaatcattactagtgtaatctttagcctcatttcttagtttaatttcttcttgaagtgtccgaataaagtctacctcatcacaaaatggatgcagctttaaataagacatgatcatcctaaagttgtaaatgttctgtattggagtcccggaaacaccccaagtgtgtattctatgaagtaaactcgtgcattttgcagaatatgttgatgaactacgtagcatttgaacttcatccagaatgattctataaaactgcatcaaagctaacggtgaagaatagtcatactttgggcttttcaaccttctcgatctgatactacggttaaactcagcatgatggacctccgtggcaataatgttatatgatgtaactataatatcgtattggcacaattgttgaacagcttcgtccacagttttgcaatctttcattatctcattatatcctctataggtataccattttaaggaatttgcgtgtaattcgatttcttcgagccattgttttaagatagcattgggacagataatcaaagtcgtctttgtcttcgtgattgttctattttcatcgtcaataaatgttgcctctgagtccttcaatttccttctatttaagagtattagtgataaaatttcaatagttttgcccaaccccatctcttctgctaacaccccctttgcacaaactgggtagtcgccgcttaacctttccttcctatattggttgtacaaatgtgcagcatcttctgtagttagaatatatcctgttaatttgttccataacaatgatggccctacctcgtcagggctgcgtgcaatgagctcgtaaccgtatgcatagtactcgttcataaaatctataagccctacttcgtcgatgactgtaggtgtatcactaagagaattaccatgcccttctttaattagcatccactcaacgctctctctttgaaatggtaagaggttaacttttaggtctggtatagattggggtaagaacggtttgatctttgatagcctatctttactatattccaagatttgagaaataaattgtttttgaatgaagtttgaatggatatggctgtgcttgtgatatcgctcaaattcgttctcgtccctattagagaacgtcaagtccagtatttggttagcctccacggaaaaccggttgaatttattatttaaaaacttcaacttcaaattaaaagataaaacccatgttaaagaggaatcattgtatcggaatacgactggagagcattcaaaatctttgtaggacaaagataattcgtgtatacgactttttagtaatttttcaggatcgttaacatttgaatttttttttcttctctttcttgatggtttgcgttctaaagatttacgattttctaactgatttcgtagggccctttcttggtttttatgagcacatatatccaagatcagcggaagttgtttgtcaacagcgatttttgaattgttctccattttaaatccaatttgaaataaggatacggaatctgacgacacaacaagtgttgcctcgttatcattttcacaaggtaagatctctatatcaacaataaatttaaataactgcctaccgttgttggaaagacttattcgctctggtatttcgatatttaccgaggcaacgttgattaattcttttccgttcttgctaactttttgagttacagtctcttgttcctgatttagcgctggcaatgctgctatcactgaatcaaaagaaccattttctaggaaaaagtcgcatttttcggcagtcacgttgtactcccttgctaatagcgcacctactgcagacatttaccgtcgaataagttggcctttcctggagttcattcctttagacagcgcctagaaagtggcaaatcaatacattcatcagccacatttcatcagctgtagatctggaaaagacgggtagcagttcgagtgttccgaaaaaggaaaaaacgagccttatccttggtcagagatgcgagcaggtaattccttgagctctcataggagtgaagctatcccagactccttggatgtccctgtatttgcggtcaagtttgttctttgactggttcgtcatttcgagctcacttaaaaacaggagttattcagctacatcttcaagctaataaaacatccgttgcgcaggcactctttttagtagttgccatttcctttattcttgaaagtacgaaggctgaaaaagagccactacgatccaaaaaatcaccgttagttttagtcgtccacgagtacgttggcataaagtctagtaatctttttactttatagcaatcaagagaaaaaaggaggataaagggacatttatttgttattgttttttgttctttttaaacttttttactggctaggtttaaggttataattataaatccagtgattaagaggaaacctcgtcaagaatcctagataatagtaatcagcgacagttatttcaacgaagtcaaactctatctctggggctttatctctcctattgacatctaactttttacaaacgcttactagaaaagacggatcggccaaagaaaaaaaaagagtgacatcgaaaaaattaaagaaaataaaatcccagatagttcatacgttatttgaagtacaaacatttaacgattggaaaagacgaaagtattgttaagagtactgcttatttagagaggatcaaacaaaatctcttcgatgcttaaaataaaggcccttttctcgaaaaagaaaccggatcaggcagatttgtctcaggaatctaaaaaaccattcaagggtaagaccaggtcaagcggtacaaataacaaagatgtttcccagattacttcttcccctaagaaaagctttcaggacaaaaatatagttcagtacccgagtgttgtcgcagatgaccatcatatgaagtctttaaccgatgaattagtaaccacgatagactcggactcttcaccgagtgataatattaccacggaaaatgtggaaacagttacttccgtgccagctatcgatgtccatgaaagtagtgaaggtcaattaagttccgaccccttaatatctgacgaatctctttcggaacaaagcgagattatcagtgatatccaggatgacagtactgatgatgacaatatggaagatgaaattccggaaaaatccttcctcgaacaaaaggaattgataggttacaagctgatcaataaaatcggtgaaggtgctttttcaaaagtctttagagccatacctgctaaaaatagttctaatgaatttttaactaaaaactataaagctgttgccattaaagttatcaaaaaggcagatttatcctcgattaatggtgatcatcgtaagaaggacaaagggaaggacagcactaaaacttcttccagagatcaagtcttgaaggaagttgcactacataagacggtttccgctggttgttcacaaattgtcgcgttcatagacttccaagaaacagatagctattattatattattcaagagttactaaccggtggggaaatcttcggcgaaattgttaggttgacctatttcagtgaagatttatcaaggcatgtaatcaaacaattagcactggctgttaaacatatgcattcactaggtgtagtgcatcgtgatataaaacctgagaatcttctttttgaaccgattgaattcacacgctctataaaaccaaaattgaggaaatcggatgatccgcaaacaaaggcagacgagggaattttcacaccaggagttggtggtggtggaattggtatagtaaaactagctgattttggtttgtctaaacaaatattttccaagaacaccaagactccttgtggtacagtcggttacactgcccctgaagttgtcaaagatgagcattattctatgaaagtggatatgtgggggattggttgcgttttgtacacaatgttatgtgggttcccgccattctatgatgagaaaattgacactttaactgaaaaaatatcaaggggtgagtatacctttctgaaaccttggtgggatgaaatcagcgccggtgccaagaatgccgtggctaagctattagaactagagccgtctaaaagatacgacattgaccagtttttggacgacccatggttaaatacattcgattgtttaccaaaggagggcgaatcttcacaaaagaaagcaggtacttccgaaagacgccatccgcataagaaacaattccaactatttcaaagagactcctcgctactgttttcaccagctgctgttgctatgcgtgacgcctttgatattggtaatgctgtgaaacgtaccgaagaagaccgtatgggaacacgtggaggattaggctcgcttgctgaggacgaagaattggaagatagttacagtggcgcccaaggcgatgaacagctggaacaaaatatgttccaattaacgctggatacgtccacgattctgcaaagaagaaaaaaagttcaagaaaatgacgtagggcctacaattccaataagcgccactatcagggaatagcaactttcccttctgtttcaatctttttacctattcctttttaaaagatatatatacattaaactccttctacaagtatatattttatacatatctacagggcgtatatatacataacattttaagataagcaagtgaatgttgattcccgtttcttagtcaacacttctttctattttacccggtcgttaccctattaaaaaaacaacttacaatcattgttcgccccttccatacttactgccactcgcaaaagggcccaaccagggcaattacgtatcaaaaaatcatgacaggctgggtaataaatattcgtgaagaaagaagaaattaaaaaaagaaacgaagaagcaaaaaaaagaaaagactccgtttaatcactttcaaccgcggtttatccggccccacccatgcataaccctaaattattagatcacttagcacgtgaaaaagaaacgtttttaatgttttttttttttttttctttttctttttttgcgttggtgaaaattttttcgcttcctcgagtataattatctcatctcatctttcatataagataagaagttttataaaaaccttttgcatcaaaattttgtagaatatctctttttcttacgctctctttctttccttaattgttttctaaagaaccgtgtatttttctagttcgaatccatcgataacattaaaagatgtctgattcccagcaatccattaaggttctagaagaactattccagaagttatctgttgccactgctgacaacagacacgaaatcgcttctgaagtcgcttctttcttgaatggtaacatcattgaacatgatgttccagaacacttcttcggtgaattggccaagggtatcaaggacaagaagaccgctgctaacgccatgcaagctgttgctcacattgctaaccaatctaacttgtctccatctgttgaaccatacatcgtccaattggttccagctatctgtaccaacgcaggtaacaaggacaaagaaattcaatctgttgcttccgaaactttgatttccatcgttaacgctgttaacccagttgccatcaaagctttgttgccacatttgactaacgctattgtcgaaactaacaaatggcaagaaaagattgctattttggcagctatctctgctatggtcgatgctgctaaggatcaagttgccctaagaatgccagaattgattccagtcttgtctgaaaccatgtgggacaccaagaaggaagtcaaggctgctgctactgccgccatgaccaaggctaccgaaactgttgacaacaaggatattgaacgtttcattccaagtttgattcaatgtattgctgacccaactgaagttccagaaaccgttcatttgttaggtgctactactttcgttgctgaagttactccagctactttgtccatcatggtcccattgttgtccagaggtttgaacgaaagagaaaccggtatcaagcgtaagtctgctgttattattgacaacatgtgtaagttggtcgaagacccacaagttattgctcctttcttgggtaaattgttgccaggtttgaagagtaactttgctaccattgctgacccagaagccagagaagttactttgagagctttgaagactttgagaagagttggtaacgttggtgaagacgatgctattccagaagtttctcacgctggtgacgtttctactactttgcaagtcgttaacgaattgttgaaggacgaaaccgttgctccaagatttaagattgtcgtcgagtacattgccgccattggtgctgatttgatcgatgaaagaatcattgaccaacaagcttggttcacccacatcaccccatacatgactatcttcttgcacgaaaagaaggccaaggacatcttggacgaattcagaaagagagctgtcgacaacattccagttggtccaaacttcgacgacgaagaagacgaaggtgaagacttatgtaactgtgaattctctttggcttatggtgctaaaatcttgttgaacaagacccaattaagattgaagagagccagaagatatggtatctgtggtccaaacggttgtggtaagtccactttaatgagagctattgccaacggtcaagttgatggtttcccaacccaagaagaatgtagaaccgtctacgtcgaacacgacattgatggtactcactctgacacttccgtcttggatttcgttttcgaatctggtgttggtactaaagaagctatcaaggacaaattgattgaattcggtttcaccgatgaaatgattgctatgccaatctctgctttgtctggtggttggaagatgaagttggctctagctagagctgtgttgagaaatgctgatatcttgttgttagatgaaccaactaaccatttggataccgtcaacgttgcttggttagttaactacttgaacacctgtggtatcacttctatcactatttctcacgactccgttttcttagataacgtctgtgaatatattattaactacgaaggtttgaagttgagaaagtacaagggtaactttaccgaattcgttaagaagtgtccagctgctaaggcttacgaagaattatccaacactgatttggaattcaagttcccagaaccaggttacttggaaggtgttaagactaagcaaaaggctattgtcaaggttaccaacatggaattccaatatccaggtacctctaagccacaaatcactgacattaacttccaatgttctttgtcttccagaattgctgtcattggtccaaatggtgctggtaagtctactttgattaacgtcttgactggtgaactattaccaacctctggtgaagtctacacccacgaaaattgtcgtatcgcttacattaagcaacacgcttttgctcatatcgaatctcatttggacaagactccatctgaatatatccaatggagattccaaaccggtgaagatagagaaaccatggacagagctaacagacaaatcaacgaaaacgatgctgaagctatgaacaagatcttcaagattgaaggtacccctagaagaattgccggtatccactccagaagaaagttcaagaacacttacgaatatgaatgttctttcttattgggtgaaaacattggtatgaaatctgaaagatgggttccaatgatgtccgtcgacaacgcttggattccaagaggtgaattggttgaatctcactctaagatggttgctgaagttgatatgaaggaagctttggcttctggtcaattccgtccattaaccagaaaagaaattgaagaacattgttccatgttgggtttggacccagaaattgtttctcactccagaattagaggtttgtctggtggtcaaaaggttaagttggtcttagctgccggtacatggcaaagacctcacttgattgtcttagatgaacctaccaactatctggacagagattctttgggtgctttgtctaaggctttgaaggaatttgaaggtggtgttattatcattactcactctgctgaattcacaaagaacttgactgaagaagtctgggccgtcaaggacggtagaatgactccatctggtcacaactgggttagtggtcaaggtgctggtccaagaatcgaaaagaaggaagacgaagaagataaattcgatgctatgggtaacaagattgccggtggtaagaagaagaagaagttgtcttctgcggaattgagaaagaagaagaaggaaagaatgaagaagaagaaggaattgggtgatgcttacgtttcttctgacgaagaattctaatctttttgatcactgctttcacagttttctttaagatttttattgatcaataatttatgtatattttaatttctatgtttttgtaatattgtttattttggtaaaatatagacgcaacttccttattataaagaaaggcattatttaaaagaaaaagcgttccattagtcagacatctttttttttcatacattcttaagctcaggcaaattgagcattgcctcatacccttttcggtaagagggtaacgaaaatatttttttggaagaataaaaataggtgacggatcatagactaggaagctttaaaacatgattgagcgtaatattatattccttctagaaaagataaaagagccaagacctaaaattttttcatccctgttctattaaaattgtggaaatgaggtttttgaggggatttgtattttctttggctttcactctatataaagtaactgccacggcagaaataggatctgaaattaatgtggaaaatgaggcaccacctgatggtttatcctgggaggagtggcatatggaccatgagcatcagctaaaagattacactccagagactttcttcgcgttacatgatatcaagaagaaaggatttttagatgaaaacgatattctatctctctacgggttgaaccgtgaagaaattgtgggggctggtgatggtatgggacaacacgatgaatctgagaaaattgacaatgaaatggctaagcgtgttgttagccttattatgaggttattggatgttgatgataataccaaaatcaccaaggaggaatatctacaatttgctaagagaggaaacaagttccctgaccttggcgttggtgtaggtcaccactccgattttgagctagaatatgaaattcatcactggaataagtttcataaggacaaagatccagacgttaaagtcgttcacaaagaagacatagaacatgaattgcttcatcatgaacatgaaattgaacatgaagaagaaattcaaagaggcgcttctagagctactgtaataactgatgacgaactagagtctagaatagagctgaaaaatattcccgagaaattcaaaaatggaattttttaatggacttggtcaagatgaatagttgagactgagaaaatattcaagacactatgtatgtagtcaattagcatgtagtaagtaatcaaagcacttaaaatatatttttaccatcgcatcgttgtgatgcctctcctttgtgattaactatctactttaaacgttctattttctatgttctaattacgtatgtattggtcttttctctccgatggtaacaagaagcgtttcgggaaacagtggcacctccttgtcccttaaatgtcgaactttaacagtataagtacaaagtgaaaaaaaaaaaaaaatggaaatatctatgatagtgatatgatagaagagctatttgaatgctatgttgtcatatttagccttacaaaagggaaaaggcaaacacagtcttttgttattactataggaaagatagaattgatattaaaacagtatgaagttattgcatttatatgaagcgagcttgaagagaaggcccaaaactacgaatgcgataatgacaggtgcgctatttggaattggtgatgtttctgctcaattgttgtttccaacatccaaagtaaacaagggttatgattataaaaggacagctagggctgtcatctatggttctttaattttctcctttataggtgacaagtggtacaagatcttgaacaacaagatttatatgcgtaacagacctcagtaccactggtctaatatggttttacgggtagctgtcgatcaattggcgtttgcgccgctaggtttgccattttatttcacctgtatgtccatcatggaaggtagatcatttgacgtagctaagttgaaaataaaagagcaatggtggcctacacttttgactaattgggcagtttggccacttttccaagcgattaacttttctgttgttcctttacaacataggttactagctgttaatgtcgttgcaatattttggaacacttacttatcttataaaaactcaaaggttatggagaaagacaaggtacctgttcattatccacccgtggtcgaataactggataagaaatcctgattttgaaaatatttggaattcaactagcatatttatcagaccttgttccttggggtactggaacagcatatacctaatagactttcggcagagagcagaccaacttcataaatatttgagtcaccaaagttggctagcaatctgcttttcctttacagatgtgcttggtcaggaacaatttatttaattacattcgtacttcttttatagaggaaatagtagctaacatttcactattgcggtcatgcctgttgttcttcagctaccgtttatgcaaaggtgtttaattaggtgtgagacttaagtgggccttttagtaccactgtgggttctggacctttatataatatttcattttttcaaaggttttttcatatgccgttaaaagaggtcaaaacatagacccgaggaacatatcttgtaaatcgctgcgttatgtatgcatattgtactcctaccttcgtaactggaaagaatcagtctgaaagtttattgagcctgaaacggagcaagattatagttgaatgtttcttattcggtgttgatagtagatgatgaccaaagctttttttaacaaactaccgtttgaggtattccgtcggtacgttaggacaggtaaaagcatccctcaaagaagccccaggacaagaaaatctcttctggtgggtgggactattgcatcagcagtagttttgtacaactttaatgacacttttcatgattctgtaaagcacacggcactgacgactaaaagaatcgctgtcgtcacacaagctaccactcgttgcttctaccattacaagagggctctaaataaaagctatgagaacaaaaaagaacgagaagttgccttaaataaatgtcataagatgtgtgccttaatcacgttgcatgcgctacgatcgaatggtgggatatatatcaaattaggccagcacattggggccatgacctacctgttgcctaaagaatggacggatacaatgataccgttgcaagaccactgtcccgaatccacctacgaagaaattgatgagttatttaaagaagatctaggcaccagcattgaggatatgtttttagaattcaacaaaaccccgataggtgtagcttccttggcacaggttcatgtggcaaaactaaaaaatagtgacggtaaaggttctagtgtagctgtcaaatgtcagcatccatcgttgaaggagtttataccattagatgttatgctgacaagaacagtgtttgaactgctggatgtcttcttccctgattatccgttaacgtggcttggtgatgagcttcagtcttcaatctacgtggaactgaattttaccaaagaagctgaaaatgcagaaaaaacccgtcattattttagtaagttcaagaagcaaacagcattgaaaatacccaaggtcattgaaagccacaaaagaattttgattatggaatatgttggaggcaaaaggttggatgatttggagtacattgacagtcacggtatctcgcgcagtgaagtttcgagttgtctctctcatattttcaataacatgatttttactcccaatgtaggtattcattgtgatcctcatggaggaaatctggccatacgatctgttaagcccgctaaagataatggataccataactttgaaattgttttatttgaccacggactctatagatatcctagcacgagaacaagaagactttatgccaaattttggttgtcgctcctattcgacaaggaccagacaaaaatgaagaagtatgccaaaggattcgcaaacatcaccgacgaacagtttccccttttagcggctgcaattacgggccgtagcattgatgctgctttgaattacgacatttcaacgagtcgaacacaagaagaaatggacgtcatggcaaatgggatcttggaaggaacgttactgagcgacttgatgagcattttgtctagaatccctcgtgtagtgcttttgatattgaagactaacgacctaaccagacatcttgatgaatgtctacagaatccactcgggccagagaggactttcctgatcatgacgcaatactgcgccaagacggtctacgacgaaaaagtggaaagaattaattcggagtatgcgaggtggtctattaaatggatgtgggagaacttgacaaactggatagtctatgagaggcgtattaatcaattgtatttttatgattttgtgttgtggtggaaaaaatttattccgaagacttggttgtcatcttaaatcgttagcgttctttctacttgtaaatatatacgtaaaattatatataacaattttatatgtgtcattaaacggaagacgttgttgctatcacagtggattgtgttatttgggtatttggaatattacagtgacttcttgcagcgttgttagtttttgccatgttctgcaagtacaaggttgaagatgtggtcgagactttgatagtatccttaaacaacttcatttttttattttgactgggtaacgacctggtgttccttctagtctcaccgctagtggcttcttctttgctgactcttaacttttgcagcgcctctttggtgtcgagtaactcgtgttccagtagaacgttgcgttccagtcgtcggtcactctccaattgtaatgtctctatcttattcctcagttggatattttcattttccaactcatctacctgtatctctaaatctgttatctgtttcttattgcacttattttgttgttggctctcaagaagatcgctttttaactttgatattacttgttccaaatcattttcatattctttcgtggcgccttcaagctcgctcaactgggtctccagtgaggagattatctgtatagctgtttccaaatccaaattcggcaccataggaaagtcgcaattgttgcacgtatatgtcccttggatattccaattaaatttgcgaggattgttctttcggccgttcgtggtttgttgtagcccttattatccctctttttcatccttaattgcaaatttatgtatgaaaactttcatttctaatgttattaattttcccgattctgcaaactaattgataaaataattgatacttgccgtcacagatgatatagagaacgttcagtttttttattgttctattgtaaaaaaaaaaaaaaaaggaagaaaaaagcaagatccgataggagaagacctctttagcggctttactgcgctacaaataaggttacgaatatgcggaatagttcatgatacgttgttgagttatagtatgtagccaatatttcctgtttttccgctgttacccttttcgaaggatcgatgaacgcttctgtcacttagtaagcaaatgtacgaaacccagagcattgtatgtacaccagcagtcgttttttgtagctcttttccatggatggacgatgatggcaagacgcgatcgtggcggagcctcactaagaaaaacaattgtggagaatctatacacacagaaatcgtacttcaagaaatattgattagcgagcctttaagcacagaacaatctctatagccaacatcttgtggaagctacaactgtttttcttgttcccgcttgagtagggccttacaaggcaagaccgtataaaataaagataactcctccgccgtatcctgaatttcgtgtgccctttctctctctctctcttcctctttcttcctttccctttccctcttcttcttatctcaacaaccgcccagcgcattagcaaaccacagtacgagctgtacggctgagccactgcacctgtctggcttgcccctttttgttgagtaaccgggtaataattcggctgtctaaacgatacaatcctcgttccacccacacccattcacccgtcgggcgaaatccaccctcgcggcctcgtttagaataccaggcaacggcaccagcaacggccccggtaactcgatcgcgttcatatatatcggatatactcttgaggcacaatttttttcggttttcggttttttctattattcttcgagatgcaaagcacacatttgagactcacaactcaagataccgcaagcacacagacgctattgttctcccaaagaataggttcctgcagtgctcttttaaggtttgaagatattgcacaaaattgtatctgatttcatctcatcgaacctcattccatcaacttccttttatcaaagcatcttgttttgttttcgcagaaaatttttcttccctttcaatttggccttttagtttttctccagtcgcaggcaagaaggtaaggaaatagaagaaaaagaaaaaaaaaaaaagggaacaataggttagatgtcgaataccccttataattcatctgtgccttccattgcatccatgacccagtcttcggtctcaagaagtcctaacatgcatacagcaactacgcccggtgccaacaccagctctaactctccacccttgcacatgtcttcagattcgtccaagatcaagaggaagcgtaacagaattccgctcagttgcaccatttgtcggaaaaggaaagtcaaatgtgacaaactcagaccacactgccagcagtgcactaaaactggggtagcccatctctgccactacatggaacagacctgggcagaagaggcagagaaagaattgctgaaggacaacgaattaaagaagcttagggagcgcgtaaaatctttagaaaagactctttctaaggtgcactcttctccttcgtctaactccttgaaaagttacaacactcccgagagcagcaacctgtttatgggtagcgatgaacacaccacccttgttaatgcaaatacaggctctgcttcctctgcctcgcatatgcatcagcaacaacagcaacagcagcaacaggaacaacaacaagacttttccagaagtgcgaacgccaacgcgaattcctcgtccctttctatctcaaataaatatgacaacgatgagctggacttaactaaggactttgatcttttgcatatcaaaagtaacggaaccatccacttaggtgccacccactggttgtctatcatgaaaggtgacccgtacctaaaacttttgtggggtcatatcttcgctatgagggaaaagttaaatgaatggtactaccaaaaaaattcgtactctaagctgaagtcaagcaaatgtcccatcaatcacgcgcaagcgccgccttctgccgctgccgccgctaccagaaaatgtcctgttgatcactccgcgttttcgtctggcatggtggccccaaaggaggagactcctcttcctaggaaatgtccagttgaccacaccatgttctcttcgggaatgattcctcccagagaggacacttcgtcccagaagaggtgtcccgttgaccacaccatgtattccgcaggaatgatgccgcccaaggacgagacaccttccccattttccactaaagctatgatagaccataacaagcatacaatgaatccgcctcagtcaaaatgtcctgtggaccatagaaactatatgaaggattatccctctgacatggcaaattcttcttcgaacccggcaagtcgttgccccattgaccattcaagcatgaaaaatacagcggccttaccagcttcaacgcacaataccatcccacaccaccaaccacagtccggatctcatgctcgttcgcatcccgcacaaagcaggaaacatgattcctacatgacagaatctgaagtcctcgcaacactttgtgagatgttgccaccaaagcgcgtcatcgcattattcatcgagaaattcttcaaacatttataccctgccattccaatcttagatgaacagaatttcaaaaatcacgtgaatcaaatgctttcgttgtcttcgatgaatcccacagttaacaactttggtatgagcatgccatcttcatctacactagagaaccaacccataacacaaatcaatcttccaaaactttccgattcttgtaacttaggtattctgataataatcttgagattgacatggctatccataccttctaattcctgcgaagtcgacctgggagaagaaagtggctcatttttagtgcccaacgaatctagcaatatgtctgcatctgcattgacctcgatggctaaagaagaatcacttctgctaaagcatgagacaccggtcgaggcactggagctatgtcaaaaatacttgattaaattcgatgaactttctagtatttccaataacaacgttaatttaaccacggtgcagtttgccattttttacaacttctatatgaaaagtgcctctaatgatttgactaccttgacaaataccaacaacactggcatggccaatcctggtcacgattccgagtctcaccagatcctattgtccaatattactcaaatggcctttagttgtgggttacacagagaccctgataattttcctcaattaaacgctaccattccagcaaccagccaggacgtgtctaacaacgggagcaaaaaggcaaaccctagcaccaatccaactttgaataacaacatgtctgctgccactaccaacagcagtagcagatctggcagtgctgattcaagaagtggttctaaccctgtgaacaagaaggaaaatcaggttagtatcgaaagatttaaacacacttggaggaaaatttggtattacattgttagcatggatgttaaccaatctctttccctggggagccctcgactactaagaaatctgagggatttcagcgatacaaagctaccaagtgcgtcaaggattgattatgttcgcgatatcaaagagttaatcattgtgaagaattttactctttttttccaaattgatttgtgtattattgctgtattaaatcacattttgaatgtttctttagcaagaagcgtgagaaaatttgaactggattcattgattaatttattgaaaaatctgacctatggtactgagaatgtcaatgatgtagtgagctccttgatcaacaaagggttattaccaacttcggaaggtggttctgtagattcaaataatgatgaaatttacggtctaccgaaactacccgatattctaaaccatggtcaacataaccaaaacttgtatgctgatggaagaaatacttctagtagtgatatagataagaaattggaccttcctcacgaatctacaacgagagctctattcttttccaagcatatgacaattagaatgttgctgtacttattgaactacattttgtttactcattatgaaccaatgggcagtgaagatcctggtactaatatcctagctaaggagtacgctcaagaggcattaaattttgccatggatggctacagaaactgcatgattttcttcaacaatatcagaaacaccaattcactattcgattacatgaatgttatcttgtcttacccttgtttggacattggacatcgttctttacaatttatcgtttgtttgatcctgagagctaaatgtggcccattgactggtatgcgtgaatcatcgatcattactaatggtacatcaagtggatttaatagttcggtagaagatgaggacgtcaaagttaaacaagaatcttctgatgaattgaaaaaagacgatttcatgaaagatgtaaatttggattcaggcgattcattagcagagattctaatgtcaagaatgctgctatttcaaaaactaacaaaacaactatcaaagaagtacaactacgctattcgtatgaacaaatccactggattctttgtctctttactagatacaccttcaaagaaatcagactcgaaatcgggtggtagttcattcatgttgggtaattggaaacatccaaaggtttcaaacatgagcggatttcttgctggtgacaaagaccaattacagaaatgccccgtgtaccaagatgcgctggggtttgttagtccaaccggtgctaatgaaggttctgctccgatgcaaggcatgtccttacagggctctactgctaggatgggagggacccagttgccaccaattagatcatacaaacctatcacgtacacaagtagtaatctacgtcgtatgaatgaaacgggtgaggcagaagctaagagaagaagatttaatgatggctatattgataataatagtaacaacgatatacctagaggaatcagcccaaaaccttcaaatgggctatcatcggtgcagccactattatcgtcattttccatgaaccagctaaacgggggtaccattccaacggttccatcgttaaccaacattacttcacaaatgggagctttaccatctttagataggatcaccactaatcaaataaatttgccagacccatctagagatgaagcatttgacaactccatcaagcaaatgacgcctatgacaagtgcattcatgaatgctaatactacaattccaagttcaactttaaacgggaatatgaacatgaatggagctggaactgcgaatacagatacaagtgccaacggcagtgctttatcgacactgacaagcccacaaggctcagacttagcatccaattctgctacacagtataaacctgacttagaagactttttgatgcaaaattctaactttaatgggctaatgataaatccttccagtctggtagaagttgttggtggatacaacgatcctaataaccttggaagaaatgacgcggttgattttctacccgttgataatgttgaaattgatggtgttggaataaaaatcaactatcatctactaactagtatttacgttactagtatattatcatatacggtgttagaagatgacgcaaatgatgagaaatagtcatctaaattagtggaagctgaaacgcaaggattgataatgtaataggatcaatgaatattaacatataaaacgatgataataatatttatagaattgtgtagaattgcagattcccttttatggattcctaaatcctcgaggagaacttctagtatattctgtatacctaatattatagcctttatcaacaatggaatcccaacaattatctcaacacccacacatttctcatggtagcgcctgtgcttcggttacttctaaggaagtccacacaaatcaagatccgttagacgtttcagcttccaaaacagaagaatgtgagaaggcttccactaaggctaactctcaacagacaacaacacctgcttcatcagctgttccagagaacccccatcatgcctctcctcaacctgcttcagtaccacctccacagaatgggccgtacccacagcagtgcatgatgacccaaaaccaagccaatccatctggttggtcattttacggacacccatctatgattccgtatacaccttatcaaatgtcgcctatgtactttccacctgggccacaatcacagtttccgcagtatccatcatcagttggaacgcctctgagcactccatcacctgagtcaggtaatacatttactgattcatcctcagcggactctgatatgacatccactaaaaaatatgtcagaccaccaccaatgttaacctcacctaatgactttccaaattgggttaaaacatacatcaaatttttacaaaactcgaatctcggtggtattattccgacagtaaacggaaaacccgtacgtcagatcactgatgatgaactcaccttcttgtataacacttttcaaatatttgctccctctcaattcctacctacctgggtcaaagacatcctatccgttgattatacggatatcatgaaaattctttccaaaagtattgaaaaaatgcaatctgatacccaagaggcaaacgacattgtgaccctggcaaatttgcaatataatggcagtacacctgcagatgcatttgaaacaaaagtcacaaacattatcgacagactgaacaataatggcattcatatcaataacaaggtcgcatgccaattaattatgagaggtctatctggcgaatataaatttttacgctacacacgtcatcgacatctaaatatgacagtcgctgaactgttcttagatatccatgctatttatgaagaacaacagggatcgagaaacagcaaacctaattacaggagaaatctgagtgatgagaagaatgattctcgcagctatacgaatacaaccaaacccaaagttatagctcggaatcctcaaaaaacaaataattcgaaatcgaaaacagccagggctcacaatgtatccacatctaataactctcccagcacggacaacgattccatcagtaaatcaactactgaaccgattcaattgaacaataagcacgaccttcaccttaggccaggaacttactgaatctacggtaaatcacactaatcattctgatgatgaactccctggacacctccttctcgattcaggagcatcacgaacccttataagatctgctcaccacatacactcagcatcatctaatcctgacataaacgtagttgatgctcaaaaaagaaatataccaattaacgctattggtgacctacaatttcacttccaggacaacaccaaaacatcaataaaggtattgcacactcctaacatagcctatgacttactcagtttgaatgaattggctgcagtagatatcacagcatgctttaccaaaaacgtcttagaacggtctgacggcactgtacttgcacctatcgtaaaatatggagacttttactgggtatctaaaaagtacttgcttccatcaaatatctccgtacccaccatcaataatgtccatacaagtgaaagtacacgcaaatatccttatcctttcattcatcgaatgcttgcgcatgccaatgcacagacaattcgatactcacttaaaaataacaccatcacgtattttaacgaatcagatgtcgactggtctagtgctattgactatcaatgtcctgattgtttaatcggcaaaagcaccaaacacagacatatcaaaggttcacgactaaaataccaaaattcatacgaaccctttcaatacctacatactgacatatttggtccagttcacaacctaccaaatagtgcaccatcctatttcatctcatttactgatgagacaacaaaattccgttgggtttatccattacacgaccgtcgcgaggactctatcctcgatgtttttactacgatactagcttttattaaaaaccagtttcaggccagtgtcttagttatacaaatggaccgtggttctgagtatactaacagaactctccataaattccttgaaaaaaaaatggtataactccatgctatacaaccacagcggattcccgagcacatggagtcgctgaacggctaaaccgtaccttattagatgactgccgtactcaactgcaatgtagtggtttaccgaaccatttatggttctctgcaatcgaattttctactattgtgagaaattcactagcttcacctaaaagcaaaaaatctgcaagacaacatgctggcttggcaggacttgatatcagtactttgttacctttcggtcaacctgttatcgtcaatgatcacaaccctaactccaaaatacatcctcgtggcatcccaggctacgctctacatccgtctcgaaactcttatggatatatcatctatcttccgtccttaaagaagacagtagatacaactaactatgttattcttcagggcaaggaatccagattagatcaattcaattacgacgcactcactttcgatgaagacttaaaccgtttaactgcttcatatcattcgttcattgcgtcaaatgagatccaagaatccaatgatcttaacatagaatctgaccatgacttccaatccgacattgaactacatcctgagcaaccgagaaatgtcctttcaaaagctgtgagtccaaccgattccacacctccgtcaactcatactgaagattcgaaacgtgtttctaaaaccaatattcgcgcacccagagaagttgaccccaacatatctgaatctaatattcttccatcaaagaagagatctagcaccccccaaatttccaatatcgagagtaccggttcgggtggtatgcataaattaaatgttcctttacttgctcccatgtcccaatctaacacacatgagtcgtcgcacgccagtaaatctaaagatttcagacactcagactcgtacagtgaaaatgagactaatcatacaaacgtaccaatatccagtacgggtggtaccaacaacaaaactgttccgcagataagtgaccaagagactgagaaaaggattatacaccgttcaccttcaatcgatgcttctccaccggaaaataattcatcgcacaatattgttcctatcaaaacgccaactactgtttctgaacagaataccgaggaatctatcatcgctgatctcccactccctgatctacctccagaatctcctaccgaattccctgacccatttaaagaactcccaccgataaattctcgtcaaactaattccagtttgggtggtattggtgactctaatgcctatactactatcaacagtaagaaaagatcattagaagataatgaaactgaaattaaggtatcacgagacacatggaatactaagaatatgcgtagtttagaacctccgagatcgaagaaacgaattcacctgattgcagctgtaaaagcagtaaaatcaatcaaaccaatacggacaaccttacgatacgatgaggcaatcacctataataaagatattaaagaaaaagaaaaatatatcgaggcataccacaaagaagtcaatcaactgttgaagatgaaaacttgggacactgacgaatattatgacagaaaagaaatagaccctaaaagagtaataaactcaatgtttatcttcaacaagaaacgtgacggtactcataaagctagatttgttgcaagaggtgatattcagcatcctgacacttacgactcaggcatgcaatccaataccgtacatcactatgcattaatgacatccctgtcacttgcattagacaataactactatattacacaattagacatatcttcggcatatttgtatgcagacatcaaagaagaattatacataagacctccaccacatttaggaatgaatgataagttgatacgtttgaagaaatcactttatggattgaaacaaagtggagcgaactggtacgaaactatcaaatcatacctgatacaacaatgtggtatggaagaagttcgtggatggtcatgcgtatttaaaaacagtcaagtgacaatttgtttattcgtagatgatatggtattgtttagcaaaaatctaaattcaaacaaaagaattatagagaagcttaagatgcaatacgacaccaagattataaatctaggcgaaagtgatgaggaaattcaatatgacatacttggcttagaaatcaaatatcaaagaggtaaatacatgaaattaggtatggaaaactcattaactgagaaaatacccaaattaaacgtacctttgaatccaaaaggaagaaaacttagcgctccaggtcaaccaggtctttatatagaccaggatgaactagaaatagatgaagatgaatacaaagagaaggtacatgaaatgcaaaagttgattggtctagcttcatatgttggatataaatttagatttgacttactatactacatcaacacacttgctcaacatatactattcccctctaggcaagttttagacatgacatatgagttaatacaattcatgtgggacactagagataaacaattaatatggcacaaaaacaaacctaccaagccagataataaactagtcgcaataagcgatgcttcatatggtaaccaaccatattacaagtcacaaattggtaacattttcctactcaacggaaaagtgattggaggaaagtcgacaaaggcttcgttaacatgcacttcaactacagaagcagaaatacacgcagtcagtgaagctataccgctattgaataacctcagtcaccttgtgcaagaacttaacaagaaaccaattattaaaggcttacttactgatagtagatcaacgatcagtataattaagtctacaaatgaagagaaatttagaaacagattttttggcacaaaggcaatgagacttagagatgaagtatcaggtaataatttatacgtatactacatcgagaccaagaagaacattgctgatgtgatgacaaaacctcttccgataaaaacatttaaactattaacaaacaaatggattcattagatctattacattatgggtggtatgttggaataaaaatcaactatcatctactaactagtatttacgttactagtatattatcatatacggtgttagaagatgacgcaaatgatgagaaatagtcatctaaattagtggaagctgaaacgcaaggattgataatgtaataggatcaatgaatattaacatataaaacgatgataataatatttatagaattgtgtagaattgcagattcccttttatggattcctaaatcctcgaggagaacttctagtatattctgtatacctaatattatagcctttatcaacaatggaatcccaacaattatctaattacccacaaatttctcagatggactagtagatttttatagagcagattttccaatatgggagtgatgcggtttgtttatgtataaatagaaagggacatatttttattattattattttagttatttagcatgtatgttattttatcggtgaattgtaatgatcgaataataattggaggttgaagaagttgcaaaaaatatttacttggacgagtccggaatcgaaccggagacctctcccatgctaagggagcgcgctaccgactacgccacacgcccaattttcttgttgtctgttgtgtttcagaatggggtacgtcagtatgataataatcatcctaaacgttcttaaattacatatgaaacaaccttatagcaaaacgaacagaatgagcaacatgagatgaaactccgcctccttaactgaactttccaaacgtataaacgcctgaaaaattagtttagatccgagattccgcgcttccaccatcaagtatgatccatattttatataatatataagataagtaacattccgtaagctgataatcccttttggcaactcgttacttcccaaagactgtttatattaggattgtcaagggaccccggtattgctcgagcccgtaatacaacagttgtctttcactgctctctatgttttgagacctccagttcaccacatatattcgatctttttcttactgttgaagcaagaatctgttggaatgaaggcctagtattgtctattgactaatattcatcttactagtatattatcatatacagtgtaagaagatggcataaagattgagaaccagtcatcagactaatgaaagctgaaatgcaaggactgataatgtaatgggataatgaaatatataaaacggaaggagaaataaccgtgatattattatgtagatttaccgactccacttggaggatttctctattctcgagggaaacttggtatattcgtacacctaatattatagctcttgataacaatgaaatttcaacaattattcactcaaccctcaagtgtatatcgccaagatcctaatcacccctctctggtggccttccctcattgtttttacacagaacaagaatccataaaatcaagatattgggaacaattcattgtcttaggaacaagtttttataatttagtttcattagcctattgtaacttcttgttttttttttttattttggctggcaaaacaagaagtataaagaagttaccactgctataacgtatatcttaaatcaagtgggcaattcttcgaataaacttagaggcgctgaagaaagaaccgctcaattagttcgatcatacaaaatacagatattgcgctgtgtattatcattacggaaagtgtgatataaacaatgctgtgttgtattcggtcttttttttccgcctggagattgtcgtttttgtttttttttctcgtgtagctgcagttatcatcgttttgcatgtctgttctgtcggtgaagccgatctcatggcacttcgctttgataccgtaaagaatcttcttcattaatacggcactgcaaggcgatatctatctctggggttaggactgataaataggtacttatcagttatcactagagacgaactgtttacgttttgaagctcgacagcaggggttcttaacgggcgtcggcctagacctcaccttgcgagaaatttttagttcatatccaggggatggtgaatggttggatctgacgaagccacggtaagggcaaggctttgcgcatgcactggccactatgcataccatatataaatagataatcaagcgtatagaaaacgacatgctaagttattttactcagtgttaggtctcttagtatttgcgtctgaaaagatcttagctctgtctttgactctatcacttatttttaagaggttctctattcgtcagtgatagaaatagcattttgacccgcacgacattggttaataagagtacttttccacgtgtttcgattgcctttatttttagcatacttgaaaataatattatcgtgagatttaggtaaaatataccacatatcaagagaaagagaagtaagaatggttgacgctaggggtagtacgccatgtttaattggtgattctataagaaacgttaatgatggaaatagtctggatttccagtatactaatcagtttaatgaggaaagtgaggcttcgaggttactaacgccacaaacgagttccaatcacgccctaagcaagatgcagaaggatgatgatattcgagatagatcttatacatctgtagcggaattgaatcgtgagggtgctttgctgaccgacgaagttgatttggagaatgttgatgcttcgaaagttcgcagcaatagagacgacctagaggcagaggagaaaaggaaaaaactactcttgttgaaaaaaaagcaaagaaataaatccatcaactcggaaagtttttcctctccttctctgcgtgcttccaaatctaattcactgattacatcaactgatcctgtcgaagatcacatcagtaagtactcttcatcaggcacccctgaaaatattacaggtgaggcagacgacgaagacgaagacataatcagaaactcttacgggcaaatgatcaaaaacaattccaacaggccacatttggcgaagggtgaatcgtaccagtccgcagaacaggaaatagatcatacggcgcctgaaaaatcagagaaaagacaagaaagaagcggtagatcctttgatagacaaaaatcttcggctgagtttctaagatccttatcgaggtcaataagtcgtggacccacaaagaacaaaacggtttcgccctctaagggagaagactctagaatgtatagtaccagcaactactctatatcattagttgatttggagaacggacccaaaattatcccggaaactttagaagaagagcaggaggacgccgaaaaggagggtgttttgatggaagacgagggtaatgaagaatacaccaaagatttggaagaagcagctaacaaagctcaaccacagtagaatggaatattgaaactggagtgacttctgatgaagtttccaattatttatatgtatacattatttatttgtctatcattaaaatttctgtcaagtaatggctttttatgtttatttcatggattacgaaatttgctggctttttagagtgaccgatgagttgcatgtacatatgtgcgaaataaaacaatacggtagtaaaacatgaatacttcgagaagtaaattcaagattgcaggcgtagcacaagaatgtccttccgcctgctagtgtgttgagcaaagcacgccatcactaatggaacccttacaaaatctcgcatggagcagcaaaccttaaatccattttctatcattcgttcctgaggacccggatatcgttttagagacaaaaatagatactacaagaggaatagggatatctgcacatggggcctcgagcatggctcattttcgattttccggcacgatgctgacttagtactatcatgccaggcaggacaggccttatggggttcttgcagcttaccaattctgacactggactgcccctggattagcgaccccgcgaccccgcgaccagactccctgaaaatggtaattggtgatgatatatgtgactgagttcagcctgggcatacaatgtttaacccttttggacatggaattaggccagcaaagggagcagctttccccgaaagcgtagtttttctccaggaacgcaattcacccctttctttcttatgcaagctcctcgtacatatataaaaatatatgagtatatatagtgcttctacagcataatcaatttaaggttccttgcctttccttaaatatgttagctatctctaaagcatcactgagaagtggtagtttttttgataactgtgattgaagttttgactacctcagagaaaaattttgaatgtcccgtgacctacaaaaccatttgttattcgagactgcgactgaggttgctaatagggttggtggtatttactccgtgctaaaatcgaaggctcccattacggttgcccagtataaagaccattaccacttgatagggcccttaaataaagccacttatcaaaatgaagttgatatactagattggaagaagcctgaagccttttccgatgaaatgaggccagtgcagcatgccctgcaaacaatggaatctagaggagttcattttgtttatgggaggtggctgattgaaggtgctccaaaagtaatactttttgacttggattctgtgagaggttattcgaatgaatggaagggtgatttatggtcattagtaggaattccctctcctgagaatgatttcgagacgaatgatgctatcctattggggtatacagtcgcttggtttctaggcgaagtggctcatctcgattcacaacacgcaattgttgcgcactttcacgaatggttggccggtgttgcgttaccattatgccgtaaaaggcgtatcgatgtagttaccattttcaccactcatgctactttattgggacggtatttatgcgcctccggcagtttcgatttttacaattgtttagaatctgttgatgttgatcacgaagctggcagatttggcatataccatcgttattgtatagagagagcggcggctcattctgcagacgtgttcactacggtgtcacaaataactgcttttgaagcggaacatcttttgaaaagaaaaccagatgggattttgcctaatggactgaacgtcatcaaatttcaagcatttcatgagttccaaaatttgcatgctttgaaaaaagaaaaaatcaatgactttgtaagaggccattttcatggttgcttcgatttcgatctagacaacaccttgtacttttttattgctggtagatatgagtataaaaataagggtgctgacatgtttattgaggctctagcgcgtttgaactacagattaaaagtatccggatccaaaaaaactgtggtagcgtttattgtcatgcccgccaaaaataattccttcactgttgaagcattgaagggccaggctgaggtgagggcgttagaaaatactgtacatgaagtgactacttcaattggtaaaagaatattcgatcatgctatcaggtacccccacaatggactgacgacggaattaccaaccgatttgggtgaattactaaagagttcggataaagttatgttaaagagacgtattttggctttgagaaggccggagggacagttacccccaatagttacacacaatatggtcgatgacgctaatgacctgattttaaataaaatcagacaagttcaattgttcaatagcccaagtgatcgtgttaaaatgatcttccatccagaatttttgaacgctaataatccgatccttggtttagattatgatgagttcgttcgtggttgccatttgggtgttttcccttcatactacgagccttggggttacacacctgcagaatgtacagtaatgggtgttccctccatcacgacaaatgtctctggtttcggtgcctatatggaagacttgatcgaaaccaaccaagcgaaagattacggtatttatattgtggatcgtcgtttcaaggcacctgatgaatctgtggaacaattagttgactacatggaagaatttgtaaaaaagacaagaaggcaaagaattaatcaaagaaatagaactgaaagactctccgacttactggactggaagagaatgggtctcgaatacgtcaaggcaaggcagttagcattaagaagaggctatcctgatcagttcagagagctcgttggtgaagaactaaatgattccaacatggatgctttagcaggcggaaagaaattgaaagttgcaagaccgcttagtgtacctggctcaccaagagatttgagatcaaacagcacagtctacatgacccctggtgatttgggtactctgcaggaggttaataacgcggacgattatttttcattgggagtgaatcctgcagctgacgatgacgacgatggcccatatgctgatgacagttaaatcctatgaggatataaacagtattaaaaaaatcttaccataaagacatacgacatttcgaggcgtttttgcttttcttttaactttcgttggcacaaactgaaatatatgtggaatgccctctgaaaatatactaggagttttgagcgatccaaacattttcttttctttttttctcttccttctagcgaagtcctcttgcgttagctgtaaacaaaataagtcaatttcattaatgaaaagtgacattatggcggtagctctctctatctttgttcagttatcaacatatagtcatacttaaagatataatagctcatagtcatatatagttctttatacttgaaaaagtgattcctaaaaatctcaacttttttcacattgtatttacaagataataaaattattaccatatttaaacgaaagataaattttgaattaaggcggtcgttacatcatacctggcattcctggcataccacctggcataccaccagcgccagcagctgctggtggttctggggcatcaacaatagcaacttcggtagtagctaatagtgaggcaacaccagaagcatcaactaaaccggatctaaccactttaaatggatcgatgataccagtggctaacatgtcggtgtattctgacttagaggcatcgtaacccttggcaaaatcatcaccatattcatcaatcaatttgccgatgataactgaaccttcttcaccagcgttttcaatgatctgcttggctggtcttgtaatggcctttcttatgatatcgacacccaatttttgatcgaaattgtcgacaacaacttcatccaaaactctagatgccttcactaaggcagtaccaccacctggcaagataccttcctcaactgcagctctggtagcgttcaaagcatcatcgtaacggtccttcttttcaccaacttcaacttcagatgcaccaccgaccctgatgacagcaacacccccggacaatttggccaaacgctcttgcagtttctccttctcatatgaatttgtggtggtaatgtcgatggagcctttgatttgttcaattctctcttgaatagcttcctttggaccactaccgttcaggataacggtgtcttccttagtaacggtaatagagtcacaagaacccaagttttctatggtacattgttctggtttcaaatccaactcctcagtaaaaacagtaccgcccgtcaagactgcaatatcaccaattgtattctttctattatcaccgaaaccaggcgccttcacagcacaaaccttaacttgacccctcaacttgttcaaaatacaagccgcaagagcttcaccgtcaacatcttcagcaatgatcaacaaaggtcttctgctttgattggaaatttccaaagctggcaagatatcttgaatggaagaaattttcttttcactcaacaatagcaatggcttttcaaattccaccttgctcgactttggatcagtgatgaagtatggagaaataaaaccacgatcaaacctcataccttcagtaacctcaagttcatcttccaatgttctaccttctctgatagtgatgacaccttcttttccaaccttttccatagctgaagctagtaacttaccaacatgagagtccccattggcagaaatggttgctacttgagcaatttcctcagatgtggtaatttctttcttgttggcgctcaaaaattcaatcactttttcaactgcaacttgagaaccccttctcaaatccatagggttacaaccagcggcgacatttttgacggattctgtgaagatggctctacctaagacagtagcagaagtagtaccgtcaccagcagcctcattggttttggaggcaacttcttgtagtaacttggcacccatattttcaaacttgtccttcaacacaatagatttggcaactgtaacaccatccttagtaatctttggaggaccgaaaggctgttcgattaaaacgtttctaccctttggacccaaagtagcagcaaccgcttcagctaaagtttcgacacccttaagaagggaggctcttccttctacaccgaatttcaattctttatgagaggagtaagcacgacgcaataaaggccttaaagtagcgcgactacgaacaacggatgatctcaacattttgaaaacttttttgcttatgatgttttctcgtgggaattttcttatattattcaaggaagtgcatgaagacgcaaccacgaccttacataatgaatgtaaaacttagtctccttcaatatatatacatgaatgtccgtctggattctgctccgggcaaaacgaagcaaaattaaagtcaccctccccatttggttttctggaaaattccacgaggtccgtatatgatgacatatacagatgggcggctataaagtaagtttccagaggtaataccaggcaataaacagcttcaattgctcgtaacaccattgtatacctacaaaaacagtggaatagggatgagacataactggctggaatttcaactgtacttctttgcacaactagtcttggcgttctacttgatcattgcgcgaatggatgcactcgcaataattcccaatagtataacaggaggaacatttggatgcattaggtatattattcatcttctttatcatcaaaattttctcttcctttatgttactatgttgctttcttttaatctatgtttttttccctttcagttgccaccgcttttctgcaagattcatagttagatttgcaaatcaaggtgttttcgggccttgttaaagccttcgcaggcgaagaagaaagggaacgtaagctgcgtgagccgaatctatttatacaaaaacaatcaaaaaagtataactacagcataaactgttgtatatacgtgttgcaaaataggaaagaaaagaagagtaaaaggactcttgatattatctcgaaaaaaccacaaatagtgtaagatttaaacagtaagccaaaagagatgactttgaaaccttcaaagagacgtaagggcaggtctcgccattccaggaagaagcaaataacgtcagcgatactgactgaggaaggaataatgatcaaggcaaaaccatcaagtccttacacatacgcaaatagaatggcagataaacgaagtcgcagcagcattgacaacatcagtagaactagctttcaaagcaacatcagtagaactagctttcaaagcaacagtgataacaacagtatatttgaaacggcttcactaattagctgtgttacctgtttaagcgatactgatacaatagacagatcggaaacatcgacaacggatacaagtaaagatgatctttctgctaatccaaaacttcattatccttcggtgaatggtcaattgccagcaaacaccgttatcccctatggacgaattctggatgccagatacattgaaaaggaacctctgcattattatgatgccaattcatcacccagttcacctttaagcagctcaatgagtaacattagtgaaaagtgtgatcttgatgaattagagtcttcccaaaaaaaagaaaggaagggcaactcgctatcgcgaggaagtaacagtagtagtagcctcctgacttccagatctccttttacgaaactagtagaggttatatttgctaggccaagacggcatgacgttgtacccaaaagggtttcattgtatattgactataaaccccattcatcttctcacttaaaagaagaagatgacttggttgaggagattttaaagagaagctacaaaaacactagaaggaacaaatccatatttgtgatcattaatccgtttggtggtaaaggtaaggcgaaaaaactgtttatgacaaaggcaaagccgttactattagcaagtcggtgttccatagaagtggtttatacaaaataccctggtcatgctatagagatcgcgcgggaaatggatattgacaaatatgacactattgcttgcgcttcgggagatggcattcctcatgaggtgatcaatgggttataccaaaggcctgatcatgtcaaagcattcaacaatatcgccattacagaaattccatgcggatcaggtaacgcaatgagcgtatcctgccactggacaaacaatccttcgtactcaactttatgcttaattaaatcgatagagactagaattgatttgatgtgttgttcgcagccttcttatgcaagagagcacccaaagttatcatttttaagtcaaacatatggtctcattgcagaaactgacataaacactgaatttattagatggatgggacctgcaaggtttgaattgggtgtagccttcaatatcatacaaaaaaaaaaatatccttgtgagatatatgtaaagtatgctgccaaatcaaaaaacgagttaaaaaatcattacctggaacacaaaaataaagggtcgttagaattccagcatattactatgaacaaagataacgaggattgtgataattacaattacgaaaatgaatacgaaaccgaaaacgaagatgaagatgaagatgcggatgcggatgacgaagactcccacttgatatctcgtgatctggcagattctagtgctgatcaaattaaagaggaagatttcaaaataaaatatccattagatgaaggtatccctagtgactgggaaagattggatcctaatatttcgaacaacctaggtatcttctatacgggtaaaatgccatatgtggctgctgacactaaattctttccggcagcgcttccttcagatggtacaatggatatggttatcaccgatgcaagaacctcgttgacgaggatggcaccaatcctgctgggactagataagggttcccatgttttacaaccggaagtcttacactctaaaattttggcatacaagataataccaaagctagggaacggcttgttctctgtcgatggcgagaaatttcctctagagccccttcaagtcgaaattatgccacgcttatgcaagacgttactgagaaatggccgttatgtggacacagatttcgattctatgtgacactttacttaatcttttccttcgtactgaacaattaatcaaaaactagaatatgtcatttctatttcttctatattttttttacgttgttgttgtttttgttgttgtttgataactttatacactccatacttctttataaaaagttttaataccattctttaatacaaccatgtttagtgagtactagctcctacacatcagatcgtcaagtacattatgattatgattattattaatattatcagtacaattattatgtgctggtagttcactaaaaaatatgacgcacacaaagagttctccttatgccctatagaactgaaatattaggtgctaacactgacaagcgctttgttcctgctcctctgctgtagaaatatcaatgactcccggtttattttggtttgcactatttgcattttcgctatccaaaggagttgactcgctgttttgaaattcaggcagcgatttggcaatctttttgaataaagctttgacattatagcctgcctttgtggacgtttccataaagattttagcacccaatagttttgcttttttctctccctcttcggttgagatttgcctttcatctgataaatcacttttgttaccaacaatgcacaatataacattttcgtcacctctttcatttttaacgtcttctatccatttatcaatatattcaaatgattttctcttcgtaatgtcgtaaacgataatagcaactctcgaatctctgatatatgaaggtattaatgatctaaatctttcctgacctgctgtatcccataactgtaatctaattgtcttatcatccaaatacatggtcttggaaagaaaatctataccaatcgtggcttggtaatgatcatcgaacgtatcatacataaatctagtgatcagcgatgtttttccaacaccctgttctcccaaaaaaacaattttgtactttgtcaatgatttcccggatctgctcattgttaatctcttctttgtttatcttttactgttcagaatcaacagcttcaaacacttcttttcacacaaccttaagtgcccaattgtgatattcttacatcatacatagtaacaatctatatatgggcaatattttcctccactaattgagctgtgctgaaggctttattacccggaaattattcggccatttttcactagaagttaataccagcactaacgaatagaagcaccctattctactcaagatgcccggttcatgaatagggagaagtatttttcttattttccttagccatctataaatatttatccttatgcctgtcaccacaatagaaaagggtccattatatatcagttgttttcgtacctctagagagacacgcaaggggctttatttaggaaacctccaaatttgctagatgtaaccattatacatagtaattacgattgtaaaacatcggaaagaacgatatatcttgcaaatagcttttctttggtaatatatgtatttacttaaaaaacgagaactagaaaatactgagtaaatttttattagacgttgttaaaggccttttatttcttaccagattttttgataccaccacccactaaaggtttaccacttttcatattagccatcaaagctttcttagcagcagcatcggccttttgcttctctttgaaggcaatgtcttcaggatctaagtcctgttgttgcttcttcttttgctttagaggcttcatcttaccaccttggcgactagacatgattgcttagggtttttcagttattcttctggttttgcaacttactgtgcgtggaagagcaatcaattacaggattttaaacatgaaattttttattttcctcgttcattttcgtcgcgggaaacttccagaagtatagatttactacaatttttatctcaggacagaaagaataaaccaaaaaagccaagacaagccaagccaagccgaggcgactggaggagcttttcatcacattcaatgacaaatcacaacaggtttccctgttagaaaaggcatgtgcactcacaattcatattttcatacagaagatatacattggatttctggagatatcaggtaaggttcgacaaaaacaatggcgtttgccaaccctttatgatgggtgatcttgtatccgcttaattgtgtgatctaaaaaggcaaagtaacgtattattggctggtttatataatttgaatatgactactttttcaacgttaaaaacgataaatacttgctcaaagggttcagcggctaaataaactacgatttcgcagcaggatcagatggattcaatcacatcattcgcaaaacattcacatcattcgtgaagcattaaaggtaataagaaaaatagaacaaagattttttaatcagtgaggaccacaaagggacagcaaatacggtgataagaatggaaggtttgaagaaaaagatttttggtgtttgcctgaaaaatgacttagcacagactaggaatgaaacgaaaggaatccactatgggttaatgactttggaaacttctaaacaactgcaggaatttctccatttgctagtaataaagagagaagtaattcaaaattttgagttgttatttcacatcataaatgttgccgttaaaatcaccgattcaaatcttccaagtgatgatatctggcatttcattttaaaattaagattttcttctgagattaatatagacgaagactccaaagttttaaattatttacttgagactggcatcgcaatggaaaatccagtcagttggaaatgcttggccgttattagcagcatcctcagcagtgtccctcaatccaaaaagattataactaacctgatcgagacagaacatgccaaaaagattggtcagttgtttgataatattcaagatttgcaacaaggaaattttctggtggaaattctctctaactgttttaaaaaaagtgcttcaaattccaagaaagtggaaaaaatacctcagttatggcaaagcaggtctaagaacaagtttttctttgaaaatgaattttacccttttagcagcaaaaatgggagcttacaaacctgccaattcctgtgcaataatttcatgtcaactttatcctttacgggtattctaaggcaggtttcttatagcggatctgaaacattaaaaaatctccgtatatttaagaaaaaagacgatgaaaattcttacttcattcagtgcatttacaacaaaatctatctttggttagacgaaaaagcccctttggaatttgaaagaaagaaaatcaggattaccaaaaacttaaaaaataaaattcaaattaaattgaggcaacctttccatgaatgtgtgagaactaccgctgataaaacagcactcttatttaacaaaacgaaggggtttcagctggaatttgaagacgagaaattaggtgaaactttttttcacaatgtcaacaatatacctaagattagtgaagtacaaaactttttagttttagactatattgaagaagaaccagagaatgaaggtgaagaagaagagcaaatcggaagggcagatgagcagaaagaggatgaagaggaagaatctctcgatgaattatccactcccatggtatatccaataaaatcatctattccccataatcataacgaaaaggttcagttagtcactcccgaccgttctgtttccataagatctgatgaatgggatttaaagtcaaatactgaagacgaagaaggtaatgttcttgcagacctgaaaataagcagcactaaggaaacaaaaaggcaaacagactacgtccatattgattcagaagaccagtcaccagtagtatccgctcagatgagaaaaatgagaagagaatctacgaaaacactagaaatattgagacaagagtttaaagataaggatgtacaaaacaaagaagaccagtccgaacaaatacaaaacccgtttgtaaatacatcctcgttagttgtaggtaaatcctgtcttgttaatcctaaggaaaagcctaatattgatcaaacggtagtcggaataaccgaattaaagtcaaattcttccattaagaaaagggatatcaacattctcgacactatatttgggcaacctccgtccaagaagcaaaaacaattccacaaaaaggagaaaaagaagcagcagaaaaagttgacaaactttaagcccattatcgatgtcccttcccaagataaacgaaaccttaggtcaaacgctccgacaaaacccaaatccataaaagtaagtaagctgcgtaccgataagaaagttacaggggaaaaatcaagcccagaaacagcggcagagaaagttgatgatcaaactgtgcgtagcaacgatgaacaagcaatgagcagagcaactaaagaaaagtgctttccagatgtcaatgaaggcaaagaaattactaaggatgacgctaaagtatctctcgagtccaaaaaaaacaacgaaacttttgttgattcaagtgtagtagaaaaacatacccccccagacaaagactgtaacaattgtaacattacagatattttggaatctaccactgttatcgacttgcagtcaccccatggattatctgctcctggtcagaatactttcacaaacaaacttcaagaacaaatttatagttcaataaatcatttttctaacgaattggtaagaaaaatttcgataataaaccaagagttaaataagaaaatcttaaaagagttgtccgaaaaataccaaaaactattctccgaattacaagataatttccagaatgataccaatgagatgcttaaattcatgggcgagatcaaagacatgatgaatctcccggaagatcagctcgttcatgctattaggacaagaaaatttgataacaacaagagataaatagtatacatatacgcaattctttttagatttaagatggctaataaaagtaatataggcaagcttattcatgttcgaatcttttttttctcgcagagctagtactctggcaatcgacacttatttcgtacaaaatgatcacgcaacttttgacaattttttttttttcatctgttttccaggaaacttggatcttttttgctccatagcacttttggtcttcctcaattaaatatttctagatcccggtagttcttcttctttgatcattaataaaaaataagcaaagcataaaagagcagcaaaaatggattctaagaccccagtcaccttagctaaagtcatcaaagttttaggccgtaccggttctcgtggtggtgttacccaagttcgtgttgagttcttggaagacacttcccgtaccattgtcagaaatgtcaagggtccagttagagaaaacgacattttggtcttgatggaatctgaacgtgaagctcgtcgtttgcgttaaaggtatattaaaaaatttactattggtgctcttcgagcattgttttttttctatatttacaaacaacagcttattttttaatatttctcaaaaaatgaagttcgaatgattattttaattgagtttagtgatgaaatcgattgcaaataatataaacgttggtaagctcatctaaacaatcgaaaggagggatagaagacagtaggtgtttgtgctttggtcggtttttccattcggtgaattcatacatctcctttattaattttaatggattctttacaagggattttcggttgccaaaaacagagaacaaatgcgtagaaatactcaatgatgtcaatttttcaaaaaatgaattaaatgattgaagtcacttaatttttgtggttttttggaggtgggttgagtgtacaactcactataattgatgagatattcgacgaacttgttacttttttggattccagaatgtttactgaattttaagaattaattaatttgaggctaacctgtatggcatggaataacgaatcgacaagaagtctcttactgtaactttctttttttttggtgcatctatcgttaaatacaatttaaatattacattcatgtacttactcaatataataatctgattacttcatacaatagaagagaaagaaacagtctctaaaactgctgtcataacgcgtggtgttgtggttttgcttaatttttttagacccatgcaccagatattgatccaatttttttttgtggctcttttgccaatcgctcttattaagtaagtttacatccgcggttatgttttgcgtctaaatttcatttacagtgatggcgagcttgcgcggctattttttatgcagtttatcatttagacactcagaagctgcagtgatgtaagatactgcttgaaactaccgttagattaataataaacaattagaactgtcctaatacatataaacttatatgctccctatcaatggcataacgttaccattcaataaattaacattatcaatgcgtcaacaaaggaatagaactatttgaaaggtccaaccttaatttttgacgtttaattgacttgccttagttttttattctcacctttccaaattttctttttttctgtgggtattcttcgaccaaagaagaacttgattttgttttttctggtgtagcctcagattcagaaaaattctccaggcgaagttgcgaactggtactactttctctagattttggcttgaaatctgtctttggtttaattttaccgcggctatttggtcgagcctcatttgtagggtctgcttgcaattcaaaatcatcattataaaaatgattcaccgcaggaaatctgacgcgctcttttttgttaagttctccagattcttcaaaccgcgacacatcttgaaatttgtttcttaaagataataatgtttttaatgagtccgccagaaattcttgatgctggaattttcctttatgtagtaattttttgattatgtcatcgtctgtgcattgctgcagagattcataattcttagaattttcaggagcccattgactgataactttactcccaccgtctaaatcacgaagagaaattaaaagaaaatctaagcatttttgcttttcattcaaaatatcccgttgtacatagtggtattgggtggaaaggtttaccaattttaataaaagcatgcataaactttgcaaaatcatatagaacatatccttagtaacatgtgaaggtacgctatttatggaaactgtaatatccgcagatacatcgaaactaaaaaccaaatttgaatctaccaatccaatttggttaatttcttgaggagcttgtagaatgtccattagttttagtttaattagatttaatgatatactatccgtaaaaccttggctctggcattgctgtgataattgagtttgtgaaagtttgaaaacgtagggaactaagcgctccaaggaaactaaaacaatcattacaattgtggttggagatgacatcggtagaaataataggagacaatttccctcaccattaatttttttaacacaccattctgcatcacttagctgctgccctttcaactcagaatccatcacacatgtgtaagattaacctcctatctggccgttgttatggttattctccatagggtttccacttatatgacactattttgtgtttgcccgctgccaacactatcatccctttttgggacgaaaaaatccatgtaaaaaaatacatcaatcataaatacatttataaatcgaaatgatattgtttataaaatttctttttgtcaatggaccaaaggtctttggaaatctctttgaacgttttccaaacatcattaataaaatcttcaatcatgagatcactgaagtgctccatattaatgccctttttcagccaaattttttcagtctctattcttgcttgggacgctttatcgaataaaaccctacttacgcgttcaaacgccaaagttgaagttaactgataaaaattggaaactgcttttaacaatcgcttatttctttcattaacagcaaatatgctatcaataatttcgtaaaatcttattattgttcctgaaaatgacagaaatttatcagtcctaacatcgaatcctgtcaaaagttcatcaaagttttcttcttcatatttaatgaattgtatttttttcccagtgtcaaggtcaataaggaaaaggaatgccttctccctgaagattaacctattaaatgctaaactgtacacttgcgatactattcgtattaaaagtggattgattagaataatagacagttttagcccttcagttaacacgttctcctggtcgttgataggctctttaaaatgaaataccattgtattaacacagactgatatggatatcaacaagaactgaaccattctgttcttatctatgattctgctttgttgagcgatgatcatctcaatattgtatatactagcaactatacttagagatcttgataaaatcaatatatcaaagggatcaatatcagagtagtaaactgaatttgtataatgttcgataggtgaaaagttagattgtataaattcaatcaatctcaatgaaaaagtggtcaatttttcgttcatctctctcttgtgaatttcacgagtagtgaatcgggaaacatctaaaaaatcgtgcattagcttaactctcctaaagtcaatactcggtgattggaaattctgcgcagtaaatatacttaagtccaaaagatcatctgaaatagacggaggattacctatatcatatgaggtggatacatcaaggaataaagcccaaaaccaaatacacctcaagttttgtttggtttcctcactttcgttcaaataccatttatcaatatcatttaaacccaaacttatgcacccctggcatagctcgttgattaagtcaacgccttgagtcgcatcccatacaccgtccgtgcaatttatcattacactaatataggacaataagaaaaattgtagtttttccacgaaatttgagctcgatgatgacaaggacgctgcacttaaagtgtgaaggaaatgactcacggaagaagggatatcttggttataatagcccaagcaaagaatttgaagtacaatgccaagattatacttatcttttgcattaccttgcaaatcgaggaggatgactaggttcttgtccgtggtatctctaataaaaagtctgtccaagagggacagaatatcgtcttggttgaagatatgcaatatgccgaacagcggtccagcaaaaaaagatttaatacagctttccatttgaggaaaactaggcaaatctgctacaacatcattttcatttaattgcgatttagtgcattcaggaagtggtttcaagactttccataaattttgaaactcagtttgaaacttattttgttcaaacaaagataaagttttccaggaagtggggccaaacacatacctcgagccattatcacctaaaaccgaagttctcagtgaccgtaatggattttctgaactcctgcaatacaccggtttcgcattattgttatcgttttccttcagtagagtctgcaaattctcaatcttctgaaccaacgctacattgggcacttgctcgaacagttccgtattagacaagggatagttgaactcttctgtgtaaacgcattgcggtagttttctaattacacattgctgacacataggcctggcctgactgcatttcagttttctttttctacaaaatgcacatgacttgatgaccttcctcctcttgcccttcttaccacttgaaacgggctctccggtagtagatttcataggaaaatgggatccatccatcccaacaaactaagtgccgtttgcctctttcttattcgtcccgtaccaaccacgtgttttccacctgtcatgggcttttcaagagtttgtcaacgcggaaaggcgccgcattgcaccttgtcgtgatgtattctaagtacaagtagtaaagaagtaatgaccctgttgttattgctccactgctgaccgctgttaatgcctcttcatgatttctgagtcattgttgtaccctctggcgaataagccactgttggttttgtgtgcatgttggaaaggcgttgcaacggactgtaactccacacacgaaagaacccttaattttcagccgctcgttattttattcagttgatcatttcttgtataaatagatttaagcaaatttaaagttgatgattctatcttcacagctagagctctacgtgaaatttgtgcaatatataggctgtgatttcgaaagttatatattctccgggtagaagtgaaaaggatggttgccgctttaacgtatttgcctactgagcttatccaaaggatatttgagttcactgtggtggaaacagactctcaatattggttgtacaatttagtggctctaattgatttttctgtctcttcgagaggtggtggctctataacggaagacttcttgacaaattacgttaggaagaatttgatggttttagatctgacctgtgaggccacgcaagactcgattttacgagcggagtacgggtttctgaagagattgttgccatacattgacatggacgcacaatatatcagagttgttgatttggaaaccaatgctgacaaggcccagaatttaaaagcagaaaaacttattgttatatttgacgaattctcagatttgaaactcatagaaaccttcttccccttggcgaattccaattcaaacataatcgagttcgtattctgtgttcgcaatataaagagttcgttttattcacctttggaaaaattacatattgcgaacatagtcgcagatattgatattaacacattgtatctggacttcgtggattcaaatatctattcggatcaaaatttctttgggatttttgatcccgatatttttcagctgattaataaaaactatagaaacttcttttctaagactaacgaaaaggggaagaaaagaccccccatttgcaagaaaatctgttttccctttgttgaaacattgaatttggattatatggcccttgattcattctttaattcgatactgcataaactaacaacaaagataaaaacatttgaaaggaacaatgagtttgacgtggataaaaatttaaatttaaactcgacaacgacagtagcagctttaattatcaagtcgatcttgcaacaattcttcaacaattttcatatcagcttccctaatttggttaccttgaattttattaagatgtctacctacccaaacaataatgagattacccaatgttgtaacttcatagatttatcttcatatgttctaaacaaatgtttaagtgagaatatctcgataaatttcctctttcagttgcactctttgaaaaattggtcaatgcccaagattaaagaattcactgggcacaaattcaagtatgacgaaacaacattttcaggttcaccagaaaggtacatcaaatcattgaggggaaacattaaaattttgcaagaaatggcaattaacgaaaccaacgatggtacttgctatttcagagtcaagttgatacctgagggggtagaaaaaactcaaataatcaactggatcccctttacttcttcatttagcgatgataccttcaaacaaagacaccatttaaagaggccaatgatttgcttgaagaacaactctttaagatcgctcactgtcaaaatcatacgtattgaaaaatgttcatccatccgaatccagggattttacctaccaaatctgcaggaactgttcatcaacaataccctttgcgacaccacccaacaccaaaaacaagcgtcaaatgatatgagttgtatagagttcacttcatggaatgaactaccacaatgcaagaaattgggatttgctcaattagaggacgactctaactacgttcttaatatcagtaacctacaagaccatttaccaaatctggacctgcgggagagtttcccaactttcttcgatataagacagaagtttgtcgtggtttgaggtctaattttcaaccaaacgtgttgtactagcatatataattaaataaatttctctagttatcacttgatttatctaataagagacgtcataaacgaatttttttttagcaataaatcctcaacgctttttgttttcatttttcggtctttttctaccatagaagataaacaagtagagcccatgtaatataatatatctacaacctattattacccaaaaccaacaaaaaccctgacagtgacaccccgttacacactcacaattaagtagggatgataaagtcaacactaatctacagagaagatgggctgcctctttgtacgtctgtggacaacgaaaatgatccctcattatttgaacaaaagcaaaaggtgaaaatcgtcgtttccagattgacaccacagtctgccacggaggctactttggaaagtggctcctttgagatccattatttgaagaaatccatggtgtactacttcgtcatttgcgaatctggatacccaagaaacttagcattctcataccttaacgatatagcgcaagaatttgaacactcatttgctaatgagtaccccaagcctaccgtaagaccataccagtttgtaaactttgataactttctacagatgacaaaaaagtcatacagtgataagaaagttcaggacaatttggaccaactaaaccaagagcttgtaggtgtcaagcaaatcatgtccaagaacatcgaagacctactttacaggggagattctctcgataaaatgagtgacatgagttcttctttgaaagaaacatccaaaaggtacagaaagtccgcgcaaaagatcaacttcgatctcttgatcagtcaatatgctcctattgtcattgtcgctttctttttcgtctttctcttctggtggatcttcctcaaatagacgtcaccccatcatcccacatcacaaatcccgatcaatttggtccaagtgtataacatagtctagttcagtattagtatagtatggcaatttatttgacataattacgtatttttcaggcaagctggcaggtgacccgccgcacctgcactttttagggagtcttttcaaggatatcatcactatatatcgaaggaaaagaggctttccaactcttttggatgatcgaattgccatcactactctattaactgtctgtgtattaactaaataatcacatagtattaagttataattcctggaaaaaaaaagaaagcgaaacgacaaaattagcatataccatgtctcaactgccaacagattttgcttcattgatcaagagattccaatttgttagtgtcctcgattccaaccctcaaaccaaagttatgtccttattgggaaccattgacaacaaggatgctattatcacggctgaaaagacgcactttctatttgacgaaaccgtgagaagaccctctcaagatggccgctccactccagttttatataattgtgaaaacgaatattcttgcatcaacggaattcaggaattaaaggagattacttccaatgatatttactactggggtttgtcagtgataaagcaggatatggagtcgaaccctaccgccaagttgaatttaatttggcctgctactccaattcatatcaagaaatatgaacaacaaaactttcatttagtcagagagactcctgagatgtacaagagaattgttcagccttacatcgaagaaatgtgtaataacggtagacttaaatgggtaaacaacattctttatgaaggcgctgagtcagaaagggtcgtttataaagatttttctgaggagaataaggacgacggcttcctaattttacctgatatgaaatgggatggcatgaacttagactctttatatctagttgcgatcgtctacaggaccgatatcaagacaataagggatttaagatattctgacagacagtggttaatcaacttgaacaacaagattagatccattgttcctggttgttacaactatgctgtccatccggatgagttgagaattttggttcactaccaaccttcttattatcatttccacattcacatcgttaacataaagcatcccggtttaggtaatagtattgccgcgggcaaggccatcttgttggaagacatcattgaaatgttaaattatctaggaccagaaggctacatgaacaagacaatcacctacgctattggtgaaaatcatgatttgtggaaaaggggtctggaagaagaactcactaaacaattggaaagagatggtatcccaaaaatacccaagattgtgaacggttttaaataaaggttgttaaaattctcacatcatccacctttttcctactctcattttctttttttgaaagttgtttgttttatataccttagtttcacaacaacataaggcatgcctatttgagattttgtgattaaaaaataatagaatacgtactatataaccgtcggtttaaagtaaataaattaaagactaagaatgaaacaattaaaaacactgttcaataacgttgctctatcctcctgagtcttccggatcctgtctccatttttttgtgtggtgacgagttgagataaaaagatttccactgctgagaataatatctataatcgataatgaaagttagaacgatcacgttgactctgaaatatagtcaatagaaaaaattaggtatcaattcaattgtaatatttactggattgaatttaatttaagaattacagaataagaggacggacaataagaggtacgctacacatctaccatcactttcagggagggcataaaatggaggagagtaagacaaaaagaaaagaggatcgcatagatttgaagaatacaccgcctcagaagaagtcaaaaagagattcaacaaatgacgaaactgcacgcacatcactacgttcaatcatgcccaggggttataaaatgatggaaaacatgggttacaaagaaggagaaacattaggtagtaatgaaagtgccctaaaagagcctattaaggtagaaatcaatacaaaaaggaggggaattcgtgcagaaaagcccgacccatcaacaatgaatgacatgcagatgagtgaacaacgatttataaaaagagaaagtgaaatgaaaaataataagcggttaaaaaaaatttggtataggatccaaaaagttgcttttgaaatgatgggtgattccgatttatacaatccaggcgaagatccgagagactttaacgtactttggagatcttacgttatgcaactaaatgaggaagtagcaaaaaatgacctaaataatcacagtaacaatgataatgaagataagaataatatgataccaatggtaaatgaaagtttggaggcttcgcctgcaataaaaggtgaaaagtttggacgtccttctacattaatagattgtgatacttcaattatcggtagtcgcattacaaaagacacagaacttgctgaattagaagaattgagcattgaaaaaagaataacaaaattgaatatattcctgaggtccgagaagtactactgttttttttgcggaatcaagtataaggatgaaggtgatctctacgagcattgcccaggagtgaatgaagacgaccacaaatgaattttatcgagataggtaaagtcatatttcaagaagaaagaaatgaacagcttttatttatataataacatataatataaaacggaagaaacgggtaaacgtcagttcgattattcttttgcggatacaaccttgaaaccttgctccaataatgcagtgacgtcttcatttttgtatggtagattgtttagtacgaatgcaatatcatcccattgcttttgggtctcgcactttctcagtcttccaactaatttctcgtttaattgcttttggtgccgttccttatcgataaaagttaacagaaatttgatgattttcttgaaactctccttacccaataaatcatctgacgataaattactaaagatatcgatgaatccattataaatggcgttgtccttggatgctaactcggtgaaaaataatctgcacatatcacttattccctggtctggattgtctaggcatttggccatttctcctaattgtcctttaaccttaacctgtccagctaaaatcaagaaggtaactgtcattaaacatgttctttgtaccattaagttttcatcatgcaaacggcgatacaaataatctgtgttttcgtctactaagttgttgaagcatactgccatgtcacctagtcctaagacagcatttgagcgaatagtaggatcaggagatttttccattactgtgattaatagcggcaggctcttttcacaatattttgatgataaacacattagtttttctagacataaggttgccgttctttgaagcattggatcgctaaacctgcttgaattagaaacaatctcttctacaattgggcaaaacttccctaatatagatttttctccaaatagtaattcattctcttttacaaattgaatagcatccgtgaaatcgtcctcattagtacctcctatcatttctagctctttatcaccaccgttatcttgtgtggtgttagttacatctgcaccttggttttttactttaccgttccgagtttctgcctcgatctttcttttcttgaattctgcctcacatttctctagatagacaagtgttttaattgccacttgtcctacaatgaataataattgactgagagaaacaactctagatgattgttctaacgacaaaatagagtcttcctcttcaggtttaccaaatgtcatcattgtcttttctctaatcagatctgtagctagtatatcgggcttagaagagattgtaaacagtgcactaagcgcttgttcgcacataggataatattcattatccttggtatagttgataattatggcatacaactttttcactgcaacatcttcaagctcttgatttattgccttggtaataatagtgcttctcttgggaaccattctctctaacgctaaacaagaataccgacaaagggtcagatcttttaaaccaacggcaccaagtccaatgtttaaaagtgactccagtccttttaatgctatttcgttatcggctaacgataacattcctaaaataataatagaaccatgaatttgttccttagaaaaccctttttcggagtcacggttgttcacattttgttctttctgcatactggccttcgatgcagaattgtaaatagcccaaaggatattaatgacatgttgatcaatcaatttttgttcatacatcattcctaatagctgttccaaagaggccaagtctgcaatagatgcgccgatgcttagattaattaaatttttggcaatatgtgccgccttctcctgcatattgcaactatctggcgcggttaaaaatagctgcttataacattctatcaaatgtactgatatactcgttccttcatcgtttgtgcccttcatccaaaccaaatgcagcattttttttataccaaattcgcttaactcaatgtcaaaagcgtctgctaaaactaggaagtccattgattctaaaacttcgtttctgttcttagaaaacagcaaattagatatcaattcaatactcttgtgtatctctttaatgaaactaatggcatctttatagtaaacaatcattaactttagcttcatgagaacactggtatttgttgcatttatattctctacctcattttctattctagaaagttctgcgctcttattgaaagaaccttctaactcggtcctacattgaccttcatcttgttctacctcttcttcaatcaaagacctttcaatcgtgtcattcagagtttcttgtgactctactttctttaaagtggaatttagctgtgattcagatcctttgagatattcttcccattcactcagcctcaattggctaccatgtatggccttaaaaggatgttttagcaataattttgaaagtaactttactgagttcctacgaactaaagaggagcggtcctgcaatgatcgtactgccaacgaagtaaatttagctttgcttttgttaaatttcgaactcaaatcgcagatctttgaacacccttgtatcgccttcgttctaacgtagggatttgaatcctggaatctttcttctagtaactcaataagtacggctatttgttgtttataatgttccatagtttgtgggtcttgagccaattcagccacaatatttccacatgcttctacaacggaacatctcaatgttatagaactattgttgagtaaggtgatgacaagattcatctgtcgaagcattattcctggtgatagctctgataatttaatcaaaaaatttgatattgcctttgggcctgtggtatcctttgcgttaaataccctggtgctgatttctttcaagatatcttctgttagttgtggatagttatattcatcattcaatagttttagtaattctgcattaaaaaccgacaaatgaagaaaataagttaaatttgtcatcaatgaactttgtatacttgaactttgaccgtgatttttaacacacatagccaaaatcctttgaataaacatctttagtgatgataccttcgtcacaggttcaatctctaataacacaaataatggtcttgtgaacaaaccaataaacaaatccttttcaggagttgtctgaaatatcttagataagttaatctccagtagctttgttatagattcaagcaagttttccatttgattacagtctcttttaaacagctcgacgtttgcactatcattcttactgtttttggcagaacggtttagattggtagactgcgaggagaccttatgtaactcatcttgtaaaaacgtcaaaagtacctgaataaggtagccatactcttctaaatgccttttccactgcggtatcaggccaccaatttcagtaaagttaacatttgatgagagattagccttaatatcttttgacagattcgacagagatgaacttatcaaatagcttagttgagtttgtaatttcggtgttaagtgcgggaagtcatggcaaagatctattaatgcttctagtgaatctggactagcatctatttgttcgggtgaaacggccaattggtctatgataacattcagttctctggatgggtcctgcaagcgaggatatgattctcgatctgttgtttggaacttggtcagatactcggaaaggctaaagccggacatctcataaagtaacgaagtcagttaccacctatcaaaggataaagatattgttactgctgcttcctttacctttcttttttttggtcagtgacaggttattttctttgtttactaaatggtcgcaagattttcgcgatgcgtttaattttcatattattgctttccaatttacccaaagtgcaattgacaaaggccattagtctttctttttacaacagtaagaatataaatatacaagtgcagtatttaagatacttaattcgaaaagtgaaaaaaaaaaaaaagaatctggaattggttattttaatttctcatatgaattgctttccaaattcttgcaatcaataacattttttatttatttttttttcaagatcagaacatgtatatatatatatatatatactgttcataccaacaattatcatttagtagtaaagtttgtgataacgatcaagctagaaactccatagatatcctgacccttactcgttgtaaataaaaggctcgcgacaagaaaacaacgcgttacttgataataattttaaaatcaaacaaaagaggtgggggaaagaagcccttactattgaatagcagacattttattcatctcgcaatactactacatttctatgaaatataacaggtataaaaaatgatttcgcccaggatcgaactggggacgttctgcgtgttaagcagatgccataaccgactagaccacgaaacctattatttatgtttaatccacgttacaccaccaattatacaaaaataaaaaagaatgacggcaaaaaagcaaaaagtgacattaatcatatttgtttatgtcttattctactggtagtattcatccattagtatattactctctgtataaggttataatgttgaaatgataatcaactattgtgtatgatcaattggtgaataatttgataattgttgggattccattttgcttaaggcaatataatattatgtatacacaatatactagaagtttctcctcaaggatataagactcaataacatggaaacaacatttctccacaaaattttgtaattatctttcttccattttatatgtttcacatcctattaatcctcaattctcgcatgttcggtttcatattaaatttgactactgtttcacatagtatatttgttgaaatgaaactctaaaatatcatttattagtagtattcatgttactagaatctattatcatatgcggtgtaacaagatggcataaagattgggaaacagtcatcaaatataatggaagctgaaatgcaaggactgataatgtaataggacaatgaaacatataaaacgaaaggtgtaataattataagattttgtggagaaatattgtttctcttttattgattcgtatattctcgaggagaacttctagtatatttcacatactcaataatataacgtttactaaagatggtgttaacatgttaaaaaaacttcgattgttaagagtccttttgttatacaactctttaaacgactgtttaaacctatcatttcatcacaaactgtaaaggtaagagttaaagcagatatatcacctatcaactgcagctaaatatcgtgaaatgaaaaactaatcgttatttgcaccaataaagaacgaaaatcccccactgaatttaaaatatttctaaagaactaaagtcatttcgactaatgagaaactaaagtcagaaacaaaaatgcaaaagcaatattaacttatgtgagcaaaatatttcatatctaatctatgaaggcaaaagaatatgattaactattttattaattttaattaaaattttattctcttcattccaaggattttgttattattgtaatatgggcgatggttagggtgacggcgacttataaaaataatcacgaaaaatgtgaattttattagggctaagagaggttctctcctcatattctcctgagctgtcactcatattatcacctggaaaaaatggtaatgaggttgtggtattcaagggagaaatttccggagatgagctttccctcccgctgttgatataatcttggtatagtaaatcttcttccgcctttatggttgcaatggataactgagaacaagaggctgattctactggtcgctcctcttttcttttcatcaatgtatcggtagaattattccaagtggtgtaggtgaaggaagttctatgctcatcatcgtgtaatggcgtctcgtttaacgtggtccttgtcttagcgcttttccactctttggccaaattatcttcaagcttttgtgtttttgaacctaaggtcctatcatcggtatttaatgtgaatgtgtcatctattatgggaggcctgctaaaaggctctggttttggataatttttaaattgtaagatatctgagtcagccagtgctttccctagtccgtggttactaaattcccaatagttaaaatcttgtagcgataagtcatatgagctatcggacatgtcctcattagtttgggaatcaggcggttcaaagaaataattaaatggttcaatttcacaatcaattgtttcagctttgaaagtttgggatacaggttcggttttacaagccgcttttgtttcaaacgattgataaaatttgtgctttaacggggagtcgttgtagtaatctgtatctttaatgaattttctgagaggctttttagaattttcattatttttcgacatagtaacctctgcattgctagcccccattttggaaggcccaagattggaattaaatatcgatgaattcgaaaccgcacgatttagatttattgctgacaaagagatcgttatttcatagtttttatagtcattattatcgtaaaatgatctatattcgaaaccatttacatcataacgacaacagaactgcaaattcaggagacaagtagttttcctttcaaaaaagttagtgtaaatcaagttttttgatattagatttaacttcaacgcagatatatcaataataaatttgaattcgtcaacatgaggggtgacagacttgttgtagtgtgcattaatatagtgaatatctgcccagttatttaaagtaaattttatctctatttttttctcgaagttcaaattattgacaaatataaggccccagatttgacagttaccaaaattattgctacaaatatcctcgtagcttacaggatcagatagttctaatgaatgaacctttatattttgtccatttaagtatttgaaaatcttgtcttccaacccagtaacgtccactttatagtcacttttgaatggattcaaattattactgaccagtttccaatctgccatatcgaatgtctcctcttcaccaaagcagagaatctccttttcaatgaacatgctacgatcatgcataagcattgcattatcctctacgtcactctcgttgtcatactcaacatccttattgtcatattctaaatcactgtaatctaaaatgtctaaactataacgatgatcttcacctccaatgaaggggaacgttagtggaatggcattgttatgcaaatttcttgtaagatttgaagcggctttttctgatatcgagataggcgccaattttgtgttgaactttttgactgtgtataaatgtgcagcaaaccttaccgatttccctgatgatgaagatgatgtcgacgaagatgcagatgtagagtcttctagtggtgaaaatgaattagaggttgttgaggaaacaaaagaagaagtggagattgtttttgcgagtttcaaagacggtttaagcttcttaccatggctgtaaggcatttgtaaaaacaaagagtaaaattattgaccttataacaagcgtcaaagaaacgagcatagaagtattatacggcctttatttgtcagattatactccagacttagtaaaaaattcaattaaattccaaactgcttaccccagatttagtgaataagagccctttattctacccgcttatctctggatgtaaaacaaataaacgcgtaatagagcagtcaaactaacagcagtaaactgtcaatatcaaaaacgtaacaattgattcaaatcagtttattctaagccgcctatgccagcctttaattttcttctcctcctcttcactcccaggttaagccatttagtttgttgctatgcggtgtgtggcgtgtttcccttttaggaaaagtgattacttgcagtttcgcgaaatctcgaagaattttttcaacttattgaaagaacatgaatatacttgttaacgtgattaaacgttttatcagaacaacctaagagtatctccttggtgaattagaagccagataatgtcatttgatagaccggaaatatacagtgctcctgttttacaaggagaatctcctaacgacgatgataatactgaaatcataaagtcctttaagaatttcattttggagttcagacttgactcgcaatttatttacagagatcagttaaggaacaacatccttgtgaagaattattctttaacggttaacatggagcatttgatcggatataacgaagacatatataagaaactatcagacgaaccttcagatatcattccattattcgaaaccgcgatcacacaagtggctaaaaggataagtattctaagcagagctcaatctgctaataacaatgacaaagatccagaaaatactagtatggatactgattctctcttattgaactctttaccaacatttcaattaattttaaactccaatgcaaatcagattccattgagagatttggattctgaacacgtctccaagattgtccgtttatcaggtattataatatccacgtcagttttatcttcccgtgccacgtacctttctataatgtgcagaaattgcagacacacaacatcaataacaatcaacaatttcaattctatcacaggcaataccgtcagtttaccacgttcttgcttatctacgattgagagtgaatcttctatggcaaacgagtcgaatattggtgatgaatcgaccaagaaaaattgtggacctgatccatatattattatccatgagtcttcaaagtttattgatcaacagtttttaaaattacaggaaatcccagaactggttccagtaggtgagatgcctagaaacttaacaatgacttgtgaccgatacctaacaaacaaagttattcctggtacgagagtcactatagtaggtatttattccatctataattctaaaaatggtgccggatccggaaggagcgggggtggaaatggaggaagtggtgttgctattagaacaccttatatcaaaatattaggtattcagtccgatgtagaaacctcctctatttggaattcagtaactatgtttactgaggaggaagaagaggaatttctacagctaagtagaaacccgaagctttatgaaattttgaccaactctattgccccctctatttttggtaatgaagatataaaaaaagccattgtatgtttattgatgggtggttccaagaagatattacccgatggtatgaggttaagaggtgatatcaatgtactattattaggtgatccaggtaccgccaaatctcaactattgaaatttgtggagaaagtgtcacctattgcggtatatacatctggtaagggatcttctgcagctgggttaactgccagtgtacaaagagatccgatgacaagagaattttatttggaaggtggtgctatggtgcttgccgatggtggtgttgtatgcatcgatgaattcgataaaatgagagatgaagatagagtggccattcatgaagctatggagcagcaaacaatctccatcgcaaaagctggtatcactacagtgctaaattctagaactagtgttttagcggctgctaatccgatatacggccggtatgatgatttgaagtctcctggtgacaacattgatttccaaactactattttatcccgttttgatatgatttttattgttaaggatgaccataatgaagaacgtgatatttcaatagctaaccacgttattaatattcatacaggaaatgctaatgctatgcaaaaccaacaagaggaaaatggcagtgaaattagtattgaaaagatgaaacgttacattacgtattgtagattgaaatgtgcaccaagactttcaccgcaggccgctgaaaaactgtcatcgaacttcgtcaccattaggaagcaattattaatcaacgaattagagtcaacggaaaggtcgtctattccaattaccattcgtcaattagaagctattattagaataacagaatcattagccaagttagaattaagtcctattgcacaggagagacatgttgacgaagctattagattgtttcaagcttccacaatggacgcagcgtctcaggatccaattggcggcttaaatcaagcaagcggaacatctttgtcagaaatccgtcgttttgaacaagaactaaaaagaagattacctataggctggtctacttcttatcaaactttgaggagagaatttgtagatacacatagattttctcaattagcactggataaggccttatatgccctagagaagcatgaaacaattcaattgagacaccagggacagaatatttacagaagtggtgtatgacaacaataaagtcttagcttgacgccttttctacttgtttgcatgtaatgaatctaaaaaattcgctacaaatacttcattattatatttctatataaattctgtaaacgaaattatactttttgaggtttcatctgcgtctcatattctttttgtataataaacgcacagacttgatatgaccgtcaatcaaaataattcaaagcttcttaaaaaagaaattgaaatcaaagacatacgaaagaaattagaaaatagaggtcgatttaccactgaacaatcctacagtacatgagctcttgaagtgactttatggggaccaatttgtcctatcgtgatattactacgggtaatactaccaaatgaaaattatcttactcaaaaggtatgacaagaacatcatcactagaacatcatcattcttaatagcaagcgccatcacgtttgccccgcctttgacagttgattagaggagtattataaaaccgttttatcatgtcgtatgtttgatcttaaccatttttacatcctataatttggagtgaatttttatatactaacttaaaagtaattgatttgtatctttccagttcacaaataattgatcgtccaaaacatgaactctctagagcagaattagaggaactagaagaatttgaattcaaacatggtccaatgtccctgataaatgatgctatggtgacaagaacacctgtgataatctcattaagaaacaatcataaaataatagcgagagtgaaagctttcgacaggcattgtaatatggttttagaaaatgtgaaggagctttggacagagaagaagggcaaaaatgtaattaatcgggaaagattcataagtaaactattcttaagaggtgattcagttatcgttgtgttaaaaacccctgttgagtaaaaagtaagacaagcagccctcaatcaacaaggaaagcaaatcatcgtaagaaactttacagtcagcggaaagcctttttttattttggaagtaagaccaattattattggctgattttctagctcttgcgaaagtattatattcaagaaaacgaataaagcatctatattatcacatttaactaaagagcatttttaataagtagatttttacataaaatatagaataaatatcaatattattaatcatttgaagttcttcaacgggtctactttaccattctttggcttactgactcttccctttttatgtgaatggcgcttcttagcattgtggaaaggaacaaacttgactttggttccatttcctctggctgattcaggaagcaagtaatctggaacacgctttaaatgctgttgcactcttgctggatgtaattctttatcgtgtcttaaactttgtagctcttttggattctcctcaaaatgtcttttcaacttctcacttgccaatagttcttgtttcaactctttgaccctagcttctctaatggcaacttgagtaacagcacggaaaccgtcttccattctgtaacggaacgcctcgacctgcttttgatcgaatttgtaaggctgtaattctaatccaagtttgctctgttgtttgatgattcgtgaaagaatcctttcatccttctttgctgtctgtagcattgatggcttatgcttaccaaattctttcagtgggactacgaatgaaattgcagtaccggtctttccgccacgagcagttctacctactctatgcacgtaggacttagccgtcgtaggtaaatcgaaattgaggacacatgcaacatttttgaaatcaacaccacgagaaacaccatattccttatctttcttcacttggaccttctttttcttgcttggtttcttatcgttctcaggctcgccttccaagcttttttcttcttgattttctgtattgtgcccttcttctatttcgtcatcttcctcttttatgtactcggtgtcatctgtggcaatcaatagttggtaaacgtttttattgaattggtcaacaatatgttgcctcgaattaacgggtagctcgctgtttaaaatacaggacttgataccaaattgttccataactagcttgagcctatatcctctgtcaatattatttacaaaaattaatgttttacccttgattaagttaagtttaaaaatgacatagcatagtaagaatttgtcaaattcactgactttaacgtaatattgaagtaatttgttttggttcttatttatttcctcgtcattgaatttaagaatagctggagaacgacaaaatttttgtttcaaagcctgtatatcgtcatttagggttgcactcatcaaaaatgtttgtaaattttttttcaatggtaagtactctccaattttgtttaaatcatcttgataaccaaatgttaacactaaatccacctcatcaactactaaaaattttagttcgttcaatgagatagaattaatctttgtttgcaacaaatccaataatttaccaggtgtaccaactatgatttctggttgatccataagtagagtgctcaaaactgagtcagacatatcggatgatatgttcagagttcttatatcttttgaacaatataagactagtttttctaaaacattatatacttgttgagccagttctcttgttggaacaagtataatacctagtgtaccattttcctctccgttatcaattgtttttttatattctaggatagtttcaattacaggaatgaggtatgccaaagtttttccggaacctgtagcggcctttgctataatatctctcttctgttgtaaagccaaaggaatagcatgtgattgaattaatgttgggtactgaaatcctatattcttaatagcttgtaataaacgagagtcgagatgaaatgcttcgaacgttgtagaatcgtcaatataagcgccttccacagactttttctcatagctcatttttttgatctttcgttgcagttttggcttagtctatttcttttgtgagataaattgtagattgactataactatcagccaaaacaaaaggctcttactcaatgaaagaaattagaagaatcgaaatgaaatgagatgagatgagatgagatgagatggtctagaagagttattctttatgttcgtgaaaaaaaatttttaaaatttcatctctaggtttcattacgtaaagagtgattaaggtaaacaataaaaggcagttctaaccagattttggtttggtattacttctataaagtagtctacttagtatgcgtaactgtttttaacatagcggtgtgaccaaattaccaccaatatttaagaggctttccaccctacctttcaaaggatttgaattacattctaaaattttcatattgttgaagtcaatcttagcagtgcttttacctatggtaaccactccagttatagtttcctctttattacttgcatattcatctttattgagaaataaagtaaaacagtcaccaaactgttctttaaacaaccttgagatttgcttcaccctctcaacttcatcaatcttaccttgtgcattagactgcacattgttatgatcatgatcatcacaagaatgactcgaaagcttgacactggcgggagctgaatccacattcataagtatagcaataatggagtctgctacagtgtcattcattaaatcttgagtccattccacaacggctagagtattaacaatagttaacttaatatcacccattatctgtagaatcaatttacctgtattggtcagattgtcttttgactcttctttaacctttggttcttgatttgttactctatcatcatcttgaagaacttcagcctctccaaacatttgtaaaatgtgccagtaaattagctcctttttacaatttacacgaactgactggcgctctcttaatatcgttgtagaaagatcgggatggtgctctcttaaatcagacaaagaaaggaagtctaattcgaaatttttgtcatctgaaactagaatcccagaaacgactatgtctttgtgttcctcttcatcaaccaaacctttttctgcttgagaatccaagttgtcttcgttttcttcctttataggttcaattttagccgcaatttcttcctttatctctacgttttcttctttatatatttcgttcacaatatttcccacagcttttgcaaccttgacaccttgaaattcaagatctacttcaacacagtttctaggattaaaaacatggacttcattatctgtaccctttaaagacgcgaaattggataacaatgcagatttcaaacggcccatgggattggcttctccatgaacaaggatgatatttggcgcactaatcttttcaataaattctaaattttcctggaagtcaacgtgtgcggcaaaggagatttcttcaacttgacaacgtcttggaatggttatttccggattatttatggaaggtattgtatctggctcaagcataataaatttcgccattgttccttcgatggagtaaccggtgattagtactagatttttatcttcagggcaccacctttcaagtaaatctcttgataacccactttgcagcatacctggtgaggccaacatcacactgggaccaaaatcttggaaatcctccaagtttctaagataagatatatttttgaatatgaagggattagtctgagagtctctaaatttttttctaatgtcatcattcatcatatttacataggtttgaaaaacgctcatacatttttttgccaaatttgatgcataaaatattgggacttgtccaccaccgagttcatcagcatgttgagaccagtactcatccagtataagcatgatttcttgagctctccctaaagcaaaaacaggcagtagaacacggcctcctctcatcactgtggaatggattagttgggttagcttcctttctctatttaaacggggctcgtgagtagcggtaccaaaggtagattccacaattaatacgttggatgaaagtggaggcacctcagcagaatttaagtgacgatctacttctctcgaatagtcacctgtgaataacaccctaaggccagcaatctctatttgaaacatcgctgcacccaatacatggcctgcatggaatgccgtaaatttgataccattgacgtcaacagtagaatgatagtccaccgtttcaattttatcgaaagaatcaactaaatcctcatctgagaatagaccttcgtctttagtccccatagaggaggatgaagaacctatactagtaactcttacaaaatctcgcagtagccatctgtaaatggctttggttggatgtgtcatgaaaactctgccttgaaagttagtccgttgcatcacatacggaagtgaagcggcatggtctaaatggaaatgtgatatcagtaagatatcgactttggaaagatcaaattcatcgtaaaaaggtaatgaagctaatccttgatatgccggatgaattcctgcgtcgagcatcactgttttacctttatattgcaatatatgacatgatcgtccaacttcgttacttcctcccaatgaaaaaaatttgaatgttgttgtatttgttcgctccatatatgcgtatacttattaatgttaacttattatgttactttttatttcctcaatggacaaaattcaattgataatacaatgtttcttttgtgctgtaacttttgaagtactgaaaacaagggtaaaagaaataaacgcttatacccgtgaacattttgaacctattagatgtgatctcaatatgtattgcgctgaagcagtagaagttgttaaagatccgctagtttttcataattttcggccagaataactgcttacccgtatttatttgcaaacacgctacttagtcttttggagaggactttatacaggaaagaaagagttttattgattttaaaaacaatataaatgaaagaaaaaaatgtgttttagattaggcttataagatatgacccatatcataattaaaaaaagcgatttagttgttcttttaaaaaaaaagagaaaaaaaaaaaaaaaaaaaaagggaatgagtttgtacatactattatattaatgtagtatcacgttaaaaagccgtagtcatcattaatcgtccaaaagtcttctaccggaccagatgtcatcatgttatcccagttagaacgctttttcctgatgtctgcgttagttactgtaggaataacattgtcgaaatgcagatttgcgctagtgtttgcttccacctgtgttttaggtccattcttctctgtttcgtcaagattatattgtacaccttcctgattggacatcatgaacaaatttctgttatacgaagggtcattctgcgtctgttgaaaattattagcggttacattgttttcagaacacatattttgttgttgatgttgttgctgctgtttgtccatggacagagatgaaggctcttgactctggggaaatattgtttgtagtatggacttgctattcaaagcatctagaacggagttattggtccaggtggaaatattgttgatcatgtcatgagcaccgttgctgaaaagtatatcgcccgaagaagagccatttcgagcttgtttgacactgaccggaattgaattgctagtaaatgacgctggtatcgaggagataatattattgccataatctgctcttaggggtgatgtactgaaatttgattcttcgacatctcttaattgcttattttcacttgtatggttagagaatattgcagattgtagaggattactgttgatcataccattgtttaattgattcgtaaaattgctttctgagaatctttgtggagaagtaatatgttgttgtggctgctcccgctgttgttgcggcagtggtcgtgatacatgctgttgcggtagcatattggaagtttgaggatatggagttgggctttgcgtcatcgctattggaatcggatccgaatgcgaagaggctgtagatatgctagaagattttgaaggacttctattggtcatagtatcggtgttcagggacgatagatacgcttgtaaattgtgctgagctagttgctgttgtagaaaggcctgctgttgaaatacttgccaatcaaactctgtttggttggttggtttcttgacgatatattggtcttgaataggcctttctacatcattttccatagttacgttgttgttacgaacatactggctgttgttgccattattgcagctgttgttggtagtgcttctgctattactttcattatcattattattaacattattattattattactattattattattattgttattattattattattatcattattattgttgtgattattgttgtgttctctgttgacgctgctgatggtcataccattgttatcattgtttacattgattttcaggtttttttcttgggaagaaggaaacgataatgtcgacgatgatgacgaagaagaagatgatgacgaagaagatgttgtataagacattgaagaatttgaaatacgtgacctgtcatccattttggttaataggtgagctaaacttttgggtacagaggtcttttctaaaacaccttgcttcttcttgaatttctcttgttcagccaaatccacttgtgaattttccacaaaaccggcgtgctcttcagcttgtcctttaccaaatattctagccacagcaggcggcataccgccattatgagatatatttttatcgtttgaattggatagattagctgcatttgcggagttagaatcatgaagagtatccccagatgaaattgccttattggcctcatcattgatgttcttgggttcagtacgcttggcgacactactagccatgaaaattaactcagaagagtctggaccacatctttcaatcaaattacctaccgtggcattcattaactgatcgaaagtatctctaaaggttcttgcaaaattagacctttctgtcataacatataaacaaacggagcaagctctcaaatcatccatcgtcgaaaagagacttgcactgattaaaggtctagtatgcttcgaagcatcgcctaatttcttcctcctttgatcgtcaaaattcctggctaaccacatacagtagattaaagttacgccagctacaaaaaccgtatgcactgctggtgtagaatgaccattaagcgttttttgatggaatatcttgtataactgacaaatttgacccgcagcagcttgacattctctaaatagtctatcctccggggcgaaaaattccaaatatggttgtataagcaatcgcactgatctatagtaataaagttttagtgtctcgttttcgaaatttttcacgtcaagagtggaataactttttctccaaacttccaaatcttcaaaaaattttcgtactaggggcaattgatcaatggattgcttcactgacctggaatcgtttttcaatagctgtaaagtctctacaaattgagattcaattcttcgcagctttagagactgattgatgaattgcacaccatggtcattggttgatggagccgccgcatgcacaccttttgtataaaaagagtcgttattgaaaagaggtaaatttatttccgactccttgattgtataaggtttccccacagcaacacaaatcattctttccaacaggtaaacacaccaaaatagtcgcagtttcttatttgcaaatggatcattaggataccattgatttagatgaagtttcttcttggatatgcccatgacatccttgattatgtcatatagtatcagagaatctctatcagtcctaataatgtaaaggacaagcaatgtcaacagttctatttgctgaacataattcaaatgtagaccacacttagtgatgtgacggatagcggtggagaaatatcggtgaggtggaaaccccttgtacttacctgtggtcatcagtaagtaggcgctgatgctgaagacaagccacattctgccggatagaaaatgaaattctatttcagaatacgaatgtgaattcgacggtggtgctgcggaagacgtggcgggagaagatggtgggataagaatcttgttgtggaggtagtggtcataaaaagtatagatttcttgttcgtctaagatagggtacttgaattgtaatcttgtgaaaaaagtgtccaagaaggaacgtgacagcttctcattcagttcaaaaatagggtcatacatcaaaaactcttttttcaaattgtatttggcaaaaatacacttagtgaagtccagcgtctctaaagggtcattcaaaaggctcgcggattggcagatagcattattgttgtttatgttgttcgtactggccgatgtatcgttagtggccgcattaacgttgctgccgttattgtttgtgttctccaggggtttgttggaaggagatggcagcggcagtatgaccatattgctgctgttcggtctagagtaatcagaagtgttgttactgaacaaatgagaaaccttcttgtactgggataattcgtagttgtactggttgcatcccggcgataaatcgagcaaagtctccaaactttttagttttttctccaagaaaatcgtatactgatctttgtcttgcctcatcaggtttggattggaatttgtcgtgacggactttatcgttttcctgaattcattcgcgtcgccagcatcaacattactattgctagtggaaatgggttttattatcgtcatgtcattcagagaagtggcagcgccagcgccagcgccaatactgctatcttgcagctcacgttttattacaggatgaggtgtaggaggtacagtgccagctgtaggggtgttgttgttggtgttactgttcgaagtggaagaagagtacttggagggctgcacgcactttattcctgctttcaaacaggcggtacaactgggtaatttatggtcgcatcgttgctttcttcttctacaaagaagacaagacctggaacggccctttttgtcttgcaacaagacgtctgtcctgttaccggccagctccagttctctcttcaactgttgtattttctcctggctaacattcttccttggacggcccattattatttacgtgtattgttggtagttagcccgaagattatgagtacgtgaaatacacttgtctttatgaaagagtggaaaaatggtggggagtaagttatactattgacgtgtaaaaaaaaaaaaaaaaaaatgttaatggaacgaccgatctaaagaaccatatataatgaatgactaaaaaaagcaaaatagttaagaatccaagaaagatactaagaaaaggcgaaaagaaaaagaaaaagtatgtccgctaacaaagattagcgtataagcaccacacgatgcgattcaggtctcaacgtgcagtgtgcaggagcaggaactattcaatgtattgttgttccagggtttttgttcgcaacccacgtcttgaccgacggtacccgcaggtgaaaattttagcaaagttacactttttttttcatttttttttttcttttctcctccatctaatttcacctgcggttaccggcggaataactcgcgcaccatttctctgtctcgggcctcgcgttcctctttttcgactcgagcggcctcttcacgctgctcgtacttcgcgacgctgcgccggcgctgcgagcgtttctgttgacggtgccactgtagaagcgcctcctctctggacggcatcgtgtcgtacgacgccgcaagttcgcgcgcgagcttaagccgggcaagctttcgattttgctcacgtgaccgcgtttcttggcactcgacaacgatcccagtgggttcatgccgtagttgtaccttagaattacacttattaatcttttggccaccgggccctctgccgccatgaaggaatttctcagtgcattgtgcttccatctctggcgtgaactttggtcgcggtggtagcttgttctttttaatcagcagcactgcggcactgctgattgacctcttactcgctcccctcatcatagtttactagtctcggattcttctgcgctttttccagggtcgcatagcttgtaggttggtagcatagacttatatataaactcatatccgttctaggaacgtatagcgcgctatggtagtccggggaaaatgcacagtttagttaagtgtatagtaattttatcgataaaggaagaatggaagaggtttatgtatacatgtaaactctgaacatctaatagactaatgatgcggttaatacgtacattgccgcttcgatgcttcaaaactagaatacggcggcaaggctcgttgttgtgtttgcggtgctttagttcgtattcaaaaccacttttgcagaaatcaatgtcattgaaaaatatccagttatcagacctatcctcatcgccattatccaagaacaaggagaagcaggagaagccagagaaggaaaacgaaggaaagcactccattggcctgttagacagattttcagaggactttattactcagggcaatggattgaaacctactacttcacaaaatcaattggatactataaagttttatcaaatgcttcgtgaaagaggcaatttttccgatgaacaatgtaaaattatcatagctctattgttgcaactactaaatgatcagttttattcctgttacaatgatttgttcttaagggatatggagctgaataaacaatcacatttgttcagctcgctagaaacagaattgaaattcgcaattcaaaactctagagacacgcaactaaatgagcaccacttgcaattattaaaactcaagagagaacttaactcaatccatgatgaactgaatgaaatcataatagatcttttgcaaaaggacgctaaattagaatttaacaatcaaaaattagaaaacacccttttgtatcgacaattaaacctgaaattgaacgactgttctaacaagattcaaaccaagatactgggggatatcaggtcacatatcgaaaatttaagatggcagacaaccagaagcggtcttttggtaatattagtccttgtttgttcgattatgatcggtgtaagcgcatctaagaaggaacgcccaggtttacaggaacctgaggaacctgaaattttagcaccaaaggaagacattgatactaccttccctcaagatcaacatgatatagattaattagcatacatattgtctgtacataagtatattgtgtgtgcgttttgtttcactgagaaagcggacgtcataaacgatgcttcctttgtttcgagcccagctgcctaaatctttttaagggctctccatctacccaatacttgagagattcatttacttccactgagttagccttattgaatgcatcgatgtggttcgatttcagcaattttttcatccctaagcaactgggcaggtatagccctttcactttctccctcaattcttctaagacctttgcattgaacgcttcagcgtttgaagatggcatgttaaaattcttgcttataaatccgttctcgcacattatatcgtacttgaatggtttgttgaacatgaggcattcatacgtcgtatttgtgccaaacttcaatggcaaagagaccgttgtaccaccttcggtaattagtcctaagttagcaaaggggtatagcaaataaaccttgtcatttatactgtacacaatgtcacataacgctaccagtgccgcgctcaaccctattgctggtccattcaaacagcaaattaaaactttggaatgcttgatgaaggcatcagtgacataaacatttctagcgacaaaatttgacacccacttgcttgtttccgaaggatatttattggtatcatccccttgggcttttgcaatacccttgaaatcagcaccactggaaaaaaatctaccactgctttgtataattgtaaaatatacatcacgatttctgtccgctagttctagtaactctcctaaataaatatagtcttcaccttctagtgcattcaaattgtcagggttcattaagtgaataatgaagaatggtccttcaatacgataactgattttctcattttgcctaatttcttgcgacatattgttcttccttcctttactgtgcgagcaatttgtgccatacactccaattatctatccatatgttcatctttcagttcttatatatagtgcttcacttttattaaccgctcttggggtaaaagagaaacggtcactgctacagcctttcggaataatatttcttatgcccgtcgccaatttcagattctttccttcgtgccgcatttattttatttttcaaaatgacgagaagttaaaatctaaaatcaggaaaaagaacagttgcagatgacgaaatacttcgagcattatcgcaataaataaggcgtgtaaacgtatgtcagatatagaatcattgggagaggcagcaggtttatttgaggagccagaggattttcttcctcctccaccaaaacctcattttgcagaatatcaaaggtcacacatcacaaaagagtccaaatcagatgttaaagacatcaaactccgtctcgttggaacgtcaccactttggggtcatctcttgtggaatgcaggaatatacaccgcaaatcacttggattctcatccagaattaataaaggggaagactgttttagaattgggtgctgctgctgctttaccttccgttatttgtgctttgaatggggctcaaatggttgtttcaactgattatccagatcctgatttaatgcagaacatcgattataatataaagtctaacgttcctgaagattttaataatgtcagtacggagggttatatttggggaaacgattattctccattgttggcacatatcgaaaaaataggtaacaataatggaaagtttgacttaatcattttaagtgatttagtcttcaatcatacggaacatcacaaattacttcaaacaacaaaggatttattagctgagaaaggtcaggcgttggtagtattttcaccgcatagaccaaaattgttggagaaggatttagaattcttcgaattggctaagaacgagttccatttggttcctcagctaattgaaatggttaattggaaaccgatgtttgacgaagacgaggaaacaatcgaagtcagatctcgtgtttatgcgtactatttaacacatgaaaagtagtaagtgggcggaattggcattctcaacaatcatttttatgtttgtaaaccagtgtcctttgatatgtaacaattaaataaaataagtcatgatggggcacgaattcgcaaaatggtagaaacacagtaaatcgaagaaaattaaataattcgttatagatataaagtagtcgattataaaaacgtaaaaacatgaaggcagggtaccttgacgaaataaaagagaggcggtgagatgaggtgaaaaataaagaatattgcaaaaaaaaatattcggactctatgaatcaatctctaataactttaaaagtaattgctttccaaataagagaaattacattgggtatagactgagtcgccggagtcataagcataacatgtggttccagaagcacattccatgtaaacccaagcgctatgatcacaaacggcgaacttcccatcagcagagcatgcaatttcaccttcagtacaggtagatttaccgttcaatttaccagccgcatattgagcattcaattctttagccaatgtacgagctgtactgtctgagcttgtactacctgagcttgtactacctgagcttgtactggtcgttgttggggaaagcgtactagtagtagctgtctgtagggaaacgacagaagaactcttcgttgctggcgaaagagtactagtgatagctgtttgaattggggccgaagaaactatgctagtagtagttgtttgaggggtcaccaaggcagcactggttatttgggaagatagagtagttttcatacttgtgatagcaactgaatttaaagtgctctctgttgtggtggtacctagactagattttgtcttggtgctactcgtcaatgtttttgtagtttgagtaattgatgttttgatagcgctgcttgcagttggagataaagtaactttgcttttactttgtgtagatgtcgtagattgtgtggtctttttctgagaagttgaagcagatgaagttgaagcagatgaagttgaggctgctgaggtttttgaggtggcaactgtagtagtggcggtctggctagcacttgttagcaaattcttcaaaatctcaacatatggttcaccatttagctcgttggaaaaggcttgagatgcatcccataacgcaataccaccaaaagaacttgaagaggcaatatctgcaatagttgattccaataaagaagtgtcagaaatataaccagagccagcagcagaagcagaaccaggtaaacctaagaacagtttgatatttttatttggggatacagtttgagcataggttaaccaagtatcccaattgaattgaccactcacactgcagtaattattgtaaaattggatgaacgcaaaatcaatgtctgcattttccaacaagtcaccaacagaagcatccgggtatggacattgtggtgcggcagaaaggtaatattgctttgtaccttcggcaaacaaagttcttaacttggtagctaacgcactatagcctacttcgttgttgttttcaatatcaaaatcaaaaccatcaacgactgctgagtcaaatggtctctcactggcacctgtaccttcaccgaaagtatcccataaagtttgtgcaaaagtttccgcttgagaatcatctgaaaagaggtagctaccagatgcaccacctaatgataatagaactttctttcctagggactggcaagtttcaatatcttcagcaatctgggtgcagtgaagtaagccatcagaaaaagtatcagagcatgcgttggcaaagttcaaaccaagggttggaaattggttcaagaaagataataggaaaatatcagcatcagaagattcacagtaagtagctaaggattcttgcgttcctgctgagttttgaccccaataaacagcaatatttgtgttagcagacctatcaaaggcatcggttggcagtagtaagaattgtgtgaatagaagaatgatgtaaaggagtgacattctattattaattattttatatttaaattagaatttcaatgtattggaaaaagagtggttttaaaaaaggtaggttgtgaaacgagcgacagttattatttttggatataaaaaggttcaaaggaatgacaggtttattttttttatgttattgagtcttaaatgagtgaaagatcttcaatgttatgaaaaaacttgactgatataatcttaatgtaatgtattgttgttgtccattctataaattatacaaggaaaggtaagtgagacgtttttcctccatccaaggacctaatacctgcatctttttatatctttgaccaatgcctatgaagccaaatacttccgtccatattagtttttttttgttccttgaatcctgcaccgaaccatcgaggggcttagttcttacaccaatgctaatgtttactcaacatctgaaacacataaacaaataaacaaacaccaaacattgcacgttagaaactcatatttactcgcacatatctgttaaggcgaggctggttattttttcaagggaccagcatttccaatttttcaccagcggcaaagaaaaataccaacaagcaggaatcacacccacgcatctcattttgcgttactatgacaactacaaaatttgaatttgttaacgagaatgacgtatataagttcgattttgttgaggatatcccacatattcccaccaaccaaccactatattaatggacatggtttttgccgtgaccgtggatctcgcagctacacaatgatatctcttgtatccgttttagcatgaatttctaaacaagactgattatataccatgcactgtaacattcagagaaaatatactaaaacaattcattgaattttatctcccatgtgtcaatccatttctttctttttggatcaccttcatatagtttactcatttggataagaacttttttagttactgcaactaatgcagcctgttcttcttttacctcctcattggtaaagttcttcggctcaaattgtacagtggataccacttcatccaaaagtaactgtatttccttcagatatgtatgtatactgtctaaagtttctgcttgattcctcttaggagtaaaatcttttgacaccagagttttcctgaaagttgatacaagtaatttgattagctttatcttcctcgtaaacccatcgaaaaacaactttatattttcatagaccttttcctggtcaaattcctctttctgtgaatcagattcggattctgaatcctcaaaatccaaaaatatatcgtccgagtttgctgaaaaatcgggttcctcaagccactcttttatttcattcattgtatcgtccattatggccacattatcttttaagatgtttgctaggatcccataaggtccagccttggaacaattagagagagaatcgcacgcattgaatattttaccaactgaggttaacctttctttgtctagagatgcattttcgtcatttttcaatctttcttgtaattcggcaatgaaatctctcaagccatcgagcaattgtagcgtactttcatccagttggtctgtaaagtatttggggcaatccttgttattgtaaaacaaagggaataaacttagtaagtagaataatggcctactaaaattttggatttcggtaatcacaactttatgattgttatcaaaagttcctggcttgcaaacaatacctatttttgtgcaatgtgccttcaatacagaggctaatttgtctagttccttagttggggtggaaccttgtagtttggtagtagaggagattttacgcaagtcttccggctttttgtatggcactaaaaactgttcatctatagaattcagcagttccaataatttgacgtcatcctttctatcactgcttccagtagacattattgtataactggtatttctcttataaagtttataataggcgtctctggtgatgcttgttgacctcaatggattttgttaaaaggaggcttcatgtcatcgtcaagatcattgcagtttttttctagttttttttttttcattgccacattatgaagcgcccattcaaaaacaactagaaaaacgtttgccaaccctaggtacggcaagatcctccttattaataaaagcatcacaccaagacagcaaagaagtaaatcgataatatgaatagcataattttgcgaagttaaagtcctaaagaaataatttatagttaacactacttacataatttcaatactgctttatatttaaagtaaaaaacgcataacggaaatacaaatacaagtcaaaaactatcttgaagtaaagatggcatgactgctattttgtttcttgttacttttaagctccttttccacaactgttaattttcttattggacggatggacctgggttcattcttctcttaccgttaaccaaggtaacgttaacgaatcttctggtgtacaataatcttttgtaagcacgacccttaggcttctttggcttttcggttttttcaacctttggtgtttgagacttgactttaccagcacgagctagagaaccatgaactttagcctaaataaataatattaatattaaaaattaatgaccatgttagtatagtgaatttttgaattatttggcgtatcagcaaggatgctaaaaataaacttcactctgctattttctcaaagcctttttaactctccgtcaaaaaatgttgttattaaactcgacattatgttaagtccacgctgttgccctcgaaaaatctgtgtcaagcaattacgtttttgatgtaacagaactcaaatttaaaaagtttcctatcatattctcagggtggagccagtttaaagatatattgcgttttatttctttttctgcggtatatatagatatgaaacaccagtaatatattcaaattagctatttcttgttattcattcctcgctgaaacgtccatttttttcatattttaaaatcctaatgaggcattacgtaccatatttgcgtagtttttgtatggggatatggaagattattacagtggcaaatttaatgtgcagttcatgtagcctttaaaatgcaacataccgttcgtaaggctgttttgttctatctattttttctgaggtttccgacaacctcacgacatttttttttttcgaacggaaaaaagaaaagcagttagtatgtaaagcacggatttttttatacatatgtacggatgtgatagtctgcaactctgcaactctgcagttctcagccatgtcagatttaaagagtttccttagcaacgtagcaaagaaatgtaccgctgtagggtttacaagcccttcgatcttgctatataatatatgatttgtcctctttcccttggtttttccacatcttcgctatcttccaagctaccacgatccaacgaacagtggaatacgcaggattcgtcgtgagaaatcgccaaaacaacttcttcaaatgcagcgtataacttggaacacaccttccaatctttgcaacggatgattacttcatgtgtggacgaactttcctgttcagccttttccaccataacggatatgtcattaaattcagtatcaccgctagtatcagctgtgtaaatgtttccccgcgtatctgcgatcgagctatcctcaattcttaataaatcttcatcgtagcggatattttcttccatctctcgatctctagtattggtatatagtgaagacatcggtttatccgcttcgataatcggaagagatccttcctcctgccggccgtctgtgtcgatgtgctggttttgggaaggattgtcagtgagcccttcttggcgttgtatcacagagtctaagggtccattccagcatatttccaaatgccaatctaattcattcacaattatcttaagttctacatcatcaccttcatttccatgctccttttttttgactcccattaaatgaatgtggttgacattactgtaccgttcaacacgtctaataaacccgtggaaggcggagccaaactcgcccgatattggtggcagcttgtacatcatcagttgaatatagttaatcattggctcttgtattcgcgtatcttgtgctcggaataatagtttgacaggtactttgaacgaatgcatgataaccttattgcttgcgagtagatttcctgtgcctactgtggttggtaaaccattgtgctcatccactcccccattcataactatagcgtcatttgggccgctagtatgtacaatttcttcgaatgttatacctagagcacaaatggggttcggttttgaggttgtatctacgcctcctgctgttcctcctgaaagtgttccgttatttgtattccattctggcattgactgtagttttatagtcatattagaggaagatccttggttcattactcgatcataccttttaaacacactcaataaagaatcacaattacactccattgttattgtattgagctcgcgagctgatataactgtatataatctgaatacatcatgaggaatggtacaccaaagctgaccagtatcccctcgtaatattgtaccgttgttactgctgttgagtgatgattttggagtggatattattgtcaatctttcactattaaatcttaagatagccgtctttcgtagcgaagcaactgtattgatagtagttcttagcaatttataatcatcaggtgcttcacaaccatttactatcaattttaatttcatttaactgaattaagacacaccttttgtcttcttttttctctcatcatctccgtatgtttatgttgctattttgatgtaaataaaaaagttgaataatagacgagggcaagtataactcgcctatatttgtagccgcaaccattgaaaaagagccatgaatatgggaaactagttgcacataaaaatgctgaaatttagaattaggccagtgagacatatacggtgttataaacgacacgcatatttcttacgatataaccatacgactacccctgcacagaagttacaagcacagatcgagcaaatacctctcgaaaattacagaaatttctctatagttgcccatgttgaccatgggaagtcaaccttaagtgacagactgctggaaataacgcatgtcatcgatcccaatgcgagaaataaacaagttttggataaattggaagtcgaaagagaaagaggtattactataaaggcgcaaacatgttcgatgttttataaagataagaggaccggaaaaaactatcttttacatttaattgacacgccaggacatgtggacttcagaggtgaagtttcacggtcatatgcgtcttgtgggggagcaattcttttggttgatgcatcacaaggcatacaagcacagacggttgctaatttttatttagccttcagtttaggattgaaattaattccagtaataaacaaaattgatctaaattttacagatgttaaacaggtaaaggatcagatagtgaataactttgagctccccgaggaagatataatcggagtaagtgctaaaacaggattaaatgtagaggaactgttactaccggctataattgatcgtataccaccaccaacggggaggcctgataaacccttcagagcattattagtggattcttggtacgacgcatacttaggagcggttcttctagtgaatattgttgatggttctgtacgtaaaaatgacaaggttatttgtgctcagacaaaagaaaaatacgaagtcaaagatattggaatcatgtatcctgacagaacctctacaggtacgctaaagacaggacaggttggctatctagtgctgggaatgaaggattctaaagaagcaaaaattggagatactataatgcatttaagtaaagtaaatgaaacggaagtacttcccggatttgaagaacaaaaacccatggtatttgtgggtgctttcccggctgatgggattgaattcaaagccatggatgatgatatgagtagacttgtcctcaacgataggtcagttactttggaacgtgagacctccaatgctttgggtcaaggttggagattgggctttttaggatctttacatgcatctgtttttcgtgaacgactagaaaaagagtatggttcgaaattgatcattactcaacccacagttccttatttggtggagtttaccgatggtaagaaaaagcttataacaaatccggatgagtttccagacggagcaacaaagagggtgaacgttgctgctttccatgaaccgtttatagaggcagttatgacattgccccaggaatatttaggtagtgtcatacgcttatgcgatagtaatagaggagaacaaattgatataacatacctaaacaccaatggacaagtgatgttaaaatattaccttccgctatcgcatctagttgatgacttttttggtaaattaaaatcggtgtccagaggatttgcctctttagattatgaggatgctggctatagaatttctgatgttgtaaaactgcaactcttggttaatggaaatgcgattgatgccttgtcaagagtacttcataaatcggaagtagagagagtgggtagagaatgggtgaagaagtttaaagagtatgttaaatcacaattatatgaggtcgttatacaggcccgagctaataacaagataatagctagagaaacaattaaggcaagaagaaaagatgttctccaaaagctgcatgcttctgatgtctcacgaaggaaaaaacttttggcgaaacagaaagagggtaaaaagcatatgaaaactgtaggtaatattcaaatcaaccaagaggcatatcaggcttttttgcgccgttagcattgcatattattgttattaccattttaaaattataccaagctgtatatagttaagtacttttcatttgtaaataaaagagaaaaatagattaataaatataataatggcataatcattatgctttaagtatttcctcaagtgtaactacccctttaaaatctgggttttcgatatttttcaggacggatttgcttacctgctgagtggatactgttggcctaatcaagtcgttcaaaagctgcagcttatttctcaatagaaatttgttaccgcagtaaagtagttcaagtgcagtatgaataaaagaccgtggtccaattgcatttctgtgctcatcgaacataaaaccgggtctcacaataataggcctgaaatatctctgcattttttctagttcaatctccgcctctcttttcgaattaatatagccactaggaatcaatgggaaacctttatcggcggaaatatacgtaaaagatctttgatttgctttttcttgctcctttttgcttttctttaggattttttgtttaaatgtatctgccaaaataatagcactttgcttattcatcatttcataagtaaaataaggactgcttttttttaaaggatttggacctgcaccaaaagatagaaggcgtgattttgaatcatatgtaggggatttggatagagtttgcttataattttcattttctaggaggattcccaaagaatgaactacgttagtagcattattcaataattcatggtaagaatcaggcttaaaaatgtcagcagcggtccattggacctcctgcatccattgcttatcatttaattcattgctatgaggagctttaccggaccttgacacagaaacgacttggtagcccgaagtcactgcttcttgacaaattcttttacctaaaaatccattgcctccaaaaactataagctttggtatcattttctacttcagttcaagctttagctgtatttttgtatacgatacatatttcccttatttttttattttttcaatgttttcctgtttttctattatgcaaaagcgacaagatggcattacgaggagacactcaactaaaaaaaaaaaatgagtcaaattgccagactttgtagagaagtaaaaagttaatgctaagatgctctttatgtattagtcttttaacatattcaaggatacgtaaatattctgattatatactaataattaataataaaaaaattgttttgatctacaagatttttatttattttcatgagtaatgtacaaaagacacatcatcacgccttatttttatccaaatgcacatcaatttgcttgtaattatcccacgcaatacgatatataaaacttggattgaacccaccgacgtttgtaatgtagatatcaatattttcaggcggaacataatcggtaatttgattaactgtatctaatctttttcttggatccattctaggtaatatacgttgggacccaccaaattcgacaaacttctctacgtcgaacggatatagaggagaaagcttatacaaacctgcaacagcaaatacaggggttctaaattctcgggcgcattcacaaacggatgatacacctgaatttgacgagatagtccccccattgacaaaaacggctttagtgccgataataaccttacccacacgggacattaaagcaaaaacagctgagtctgggactactagggtttctatgttgtgctgtgctaattttttggcaaactcatgtgcattcttggtgttattagggaacccctctgtaactaaaaccgtaaatgttctattactacgttcgcgagcagtaatcagaaattttaatacggtttttgaatcaggtgtgggagttaataaaatctcatgatcgtgaatcaaatcaatagcaatttgctgaataccttcatcaatgttttttatctcatctataagatccttgataccctgaatggctacttgacggtaatcagtcttggttttcatactagagctccctgaactattttttctattctgatgaggttgctccggtttctgtaataaattaaacatagaggaaatcaaaggttcagcaacggatgtggatgtgacagttgtgctcatagtgtcttcttctacttcatccctcaaaacagccagtattcttctaattacgttaccgcaactgaaagcagtaggatgagctttttctagactattacctaaatctctgatttgttcaataaggtcattaacatggttccaacgagctgcagagataaatcgcattaacagttgtaaagtttccaaggcgatggcgtatgaaccttgcacttgtcttctttttaacttagcaacgaaagtgtcaatggtaacattcacatcagatgttgccgcattcggatgtactgaagtgaatgcttgagaggacatcttatgttgggcaaaagttcgaaagttggcgtgttgtgtttactggttccgcacgagtaatgaatggtctgtttcatttatgaaggttttttctatgtccatttttttttttcagcatcacgaagaaaaaaagcttgcggttgggaagcagaggtatcatatactcaagctgtatagttcaaagcctttcataaaggctattccttagtatatatgataatgggcttgctatgtgtttttgaatctatctaaaatttcttgctatgtagtcgtgtgtagcatagagacatatcaagaaaaggctaaaatatcttcggttatgcaccttattcaccgttatattcggccagatttcttgcagtttctattaaaagggctctaagtttcatatcctctggggctaaagctaaacctctctcgcatgttgccctagcctcttcccactgtctcaattttagcaaacagtccgccttcctgacaaatacgtctggttggataagtcccgtaccaagtaagaaatccaagtcttgcaacgcctctaaatgctttccgagtattaaacataaatctattttactacgaagcataaagtgtagctctggtagctgaatagcaaaagcttcccaaggcgctctttttctttgtgccatttcgattgctaaagaaacattcttcaatgcctcattcaattttttttgttgtaaattcttcataccactttcaaataaacccttgatcattttgcttagagcttcattcggttgtggtgtaaaatttgggttggtttctccaatcaaagatgtagtgagaacatttatttgatcgatattagtttcggtagatagtgcaacaacagcatcactcgcagtgatcagtttactgtttgcattgtattcaagggtaaccatggttgaataagcttgctttggtatgcctttaacgcaagttgaaggagacgtttctttgattttaaggctattggttttatgttcaaagatataatctaattgttacgtgtgctcctacatccgtttgaaacgatccataaacgatctaaaaaatataatattagacaagccaaatacgtttaaatatacttaaatcacagcatattcacattcaactatttgttatatatttaaatctgttttataaaagacaggagtaccagttagtttgtgttttcttgttgcaattataaaatcttcaaaatcatgtggatttttattgaatttctatatcgagatgaatgtaaatatgtatacagtttagggtagggaaaaaagaaagcttgttctcgtttgtcccttataaatcagcatcatcttcatcaggcaatggcaaagcagtagcttgttccatttcttgttggtattgttgcatcaattgttcatcgacttggacttctggtggggctaaagctggagaagcaacaaattctaattgtgggttaccagccaattttctggccaaccataagaaaggcttttcaaagttgtagttggacttggcagaaatatcgtagtattgcaagtttttctttctgtggaaagtgatagtcttggccttgacctttctttctttgacatcgaccttgttaccacacaagacaattgggatgttttcacaaacacggactaaatccctgtgccagtttggaacgttcttgtaagtaattctggaagtaacatcgaacatgatgatggcacattgggcgttaatgtagtaaccgtctcttaaaccaccgaatttttcttggccggcagtatcccagacatcaaatttaatttcaccgaagttggtgtaaaaggataaaggatgcacttcgacaccaatggtggcgatgtacttcttttcgaattcaccggtcaaatgtctcttgacaaaagtggtcttaccagtaccaccatcaccgacaagaactagtttgaatgttggaacttcaccgttagcagctggggcagacatttataatataaatgagtttatttgattttccttttgtactggactaaaaatcgattgagggaaaaatgttgaaggagcagttcttcctgtttaaaaacgaaacaaacttaaaaggtgaggaaaagttgatcatacagttcaaatttttcaaaatcttcgccaaagaaaaaagaaacgaaaattttttttctatctcggtgggatgagctttcgtccagagcgatattatcctaaggtgacgaaccacgcatgtccttcataaacggatcattatttatttaccaaagaagcgtaggtcatacttagaaagtaatagttattgaaataaaagaatagtagtaataggaaagataaagacgtgtctatgtacaattgtattttttgtttaaaaaataaattctgcattttgtgtggctgattacaaagagtgcgtagtgtattttgctttttctttattgtactggattcgaatataaaaagatgagaggaagaaagccaaaaataatgatcttgttcagcttgtggttctgtttgttttttcttcgacaaggaggatgctatgaaaagttcaatgactttctttggtttcctcagcatcatccaaaactagccaatcctcttcaattggctctgactcaccctcttcagactctttagcaacatgagcagtttctacattttgctcggtgtaagcctttaaagcctctgggccttgaagttccaattctggtagatttggtttttgtggtgggttccaaggcttaacattaccttcagcatcttgcaaggtacttggagccagtttggtgtcttttagttccctcaaatacaaatcttgtatgacgttgtaggatattcttgtggtagtgaaatttctattgcacagtctcaatggcagaactgaagcattgagcagtattcttctggaagcgatagggaacattttgattaggactggtacgcagacggttcaagtttgtatggactggtgactggtagatgaacctgtatataagttaacaccccttccttataacatctgagcagtgggtttttttttttttctttgatattgaggacaaaggaagaagttggttggtcgggtaaaagaactacgctttttttatgatgcataattggttcgtgtatggcgatatgagaatcggcaatcaaatacaataccaacatacttgttttacataataacaagcagtctggacaagcttgatagactaataatcttgaatgatgtttaaatgctttttcgaggaaagcggcatttgaagataagcgcaagttctcttacaataagctcgatttcaataaaaacaagtgtgtatgcacaagaggcaacagaacgtcaatgcccagaaaatgaagtatttcggcttttccttccaatgcatttttttttcattagaacgctgatcagctgtgtatagtttaattttattctcattttcattttacaattttaagagccgccgaggcctagaacgagaaatccgtttcccgctttttcttctccttacgtcgtcagattctatatgggcagttctcgcgttattcgtcatcaggcaagtaattatgcccaatcagcttaccaatgtcacataaaggaaccactattatccctttttggtaatgaaaaacaacactcttccggtacgacagccgctgcggcaattacttttccccaaaagctcataatcgatcaattaacgcgtaaacgaaaaacaaaaaaaaaaaaaatacgtaaattaggtcttcatacgagcgtttttttttttttgaggatcgtttgcatgtctagcgcggcaagcgtgtttacaggcattcgttgtgtgttcatgtttagaacaaatgctaagtgataattataactgaatcctactcataacaattgcacaccttgtcgctttcttttactcaagggcgacaaaacgagaacacatcctcgagctatagccgcggggcctgctgactcgaaactcgtcgggctttgcagccataatccagggcagtggccgcatcgttcgggtcgaatggagggctagctacttgtgatttccgaaaaacggactgcaaaaaatgaggaacaatagaacaccgcgcgctttcttttggggctgtctggagaaaccagtgaaaagtgcgcacgcgtattgcggcttaaaaagatacccgtccattcaagaatggccgatttaacagaaaagagtaaagagatgagttttgcgagatcagaaacaaaaacaaaaaggaaaaaaaaaggaaatttttttgggagaaggaaaaaagggttaagtctgtagagaaactccgtagttcccttctgtattactaattggttaccaagtaataaatacctgagagtagtaatatataaaagagaaatcgtataaggaccgtgttaaatttatatatattaaggaagtctttcggttggtagtgtgagataactaattctttttggagagccttcttctttgctctatcgtggtaataatctacatattctcacaatcgcacacgtacgctttctctctcacaagtaacaaattattctttttgcattatagactacgtacgataaaaatataaaaacagaaaatggtcgaaggtgattttgtcgatgagcaatcgaacattgccttactaagctccaaatccatgtgtggtgatcatcatagcgtcaagaatagcataggggatgagatctttaaattattgacaaagattttaaattcggatgagaaagcaagcggagatgtgcacacactcgtttctgggaccccggatctctcaaattttaacctcgataatgaaccactggaaaacatactcgctgttttcataatatcttttattattgtagtggttggagttttactacttgggttgattggcatgatattcatatctctccgttcaggcagcagtaatgataagaaactacagtccaacgatgaagaaaagcaagcacttgctgaaaaagcatgaaataaaaatagatataatagatggcaccgctcttcacgcccgaaagttggacattttaaattttaattctcatgatagtaacgatcgtgcacattcaattaattatcgcataccaaacattttttttcctttttcaattcaactaatctcaattttttaattttcctttttttatttcctttttttttattctcatcataccattttcattcgttgttgatatctctattgttttttttggcaaaatatagtctacatataatatttaataatctaatctgatagcgttaatttccataccgcctccttttatatccgttggcactcgacggtttccgtatgccgtcggaatgcatccgcttcttggactccttgatcgtggtttgcagtatatctacactgtaaaatatagaagtttttggaatggtgttactccattgtgataatatctttgggggttctagcttctttgggttattcaacctaggaaatggattgctctcgcacgtctcatctctggatcttgaagtttgcttgaaggaatggtgtgcagatttttcattggctctttggggtaatttgctggctttaaccaaatctcctatatcaaacctgttagcatccacaaatactttggaatatcctggtgagccatcgtataacaatttcaaggtatctattgaggtttgtgccagttctttttggttcattttcttcacatgcatgatgtgtcttttctccttatttgaaaggcatgtaacttttagcgtctcattttgactactgttttctctttctttcctgcctctttttccaatgtggcgtcttttatgattatgtttattaataatgtctcttgctttgttcctataatagtcagctgttatacgaaggtgattcttaccgaccaagtgcgatttacgaacgctcaacgtgtcatgggtcaaatacgaatgacagtattcacaatagtatctcgtcattgcctatctctttcctctccgttacttgagcaccttcatcgcctacactaggagctcatattatatcttcagtatagcaagaatattttctgttatccttaacgcttacccgcctatgtaccttgacacttgcggaaatctagtgttcaatgataaggtactgtgtggaacatatgaaagtgaaaagagtttgaaccgtttattatctctatacaagtgtctctattcacatataaaagagtgaaaataaaaataacttttaagattttattacctacatgagattagaaaaatcataactatattactcagcggctgtgcctgttgttgatcaaaagaaaagatccgccccttcgaacgtcttagtgccgccttttgcccgcttatcaattttctctgagggaacataacggcatttatctattcgacttccaaatctacatacacgtatatagatacatatatatatgtgtgtgtgcgcctgtgtgtactagcacttctcaatattataattcttccgtaaagttcgatcgtgacttcctgttgcacagttatcttaaataatagaataaaaagctaacgcagattcaagtggggcgttgtcaggcacacaaaaagacaagacaaaaagtagcgtactagacttacagttatgctgttgtgtaatagaaaagtccccaagactttaaatacctgttttatactgcatatattcactctgttaacactgggtgtgttagtgtccggaatgccgtcaaaaatggtatcattcgcctctcaggagactttgcagagaataaataatctccttcgagggtctgccaatcgagatgttgacattattgcagaatatttgaaaaaagacgacgatgatgatggcggcgataaggatcaccataacatcgatattgaccctttacctcgccgtcctagtttaacgcctgataggcaacttctaaaagtcggtttgcatggtgctataagttcagatttagaagtctgtagtaatttgactataaatgaggtactcctgaaatttcccggttctaacgctgcagacgctgcagtaacacaagctctttgtaagggtatggtgaatttttttaatagtgggattggaggtggtggctacgtagttttttctggcaaagacgatgaagatcatctatccattgattttagagaaaaagcacccatggattcacataagttcatgttcgaaaactgctctctatgctcaaaaatagggggtcttgctgtcggtgttccaggtgaattgatgggtctctatcgcctctttaaagaaagaggtagcggccaagttgattggcgtgatctaattgaaccagtcgcaaagctgggaagcgtgggttggcaaataggcgaagcactcggtgccactttagaactttatgaggatgttttcctgacattgaaggaagattggtcgtttgtattgaattctacccatgacggtgttttgaaagaaggcgattggatcaagaggccggcactatctaacatgctaatggaactggctaaaaatggttccgtggccccattttatgaccccgatcactggattgcaaaatccatgattgatactgtcgcaaaatacaatggaataatgaacttgcaggatgtttcatcgtatgatgttcatgttactaaaccactgtccatgaaaattaggaagggcgccaatttcatccctgataacgatatgaccgtattaacaagtagcggctcaagttccggggctgcactacttgcggcgttaaggataatggataatttccagaatcaagaagggggcgattatgaaaaagaaactacctatcatttgcttgaaagcatgaaatggatggcaagcgcaagaagcaggttaggcgattttgaaggcgaagcattacctaagcatatagaagaggtattggatccagaatgggctttgaaagcagtgaaatcaatcaaaagaaactctcaagacggaaattttaaaactttagaaaactggacgctttatgatccggcatacgatatcaataacccgcatggaactgcccacttcagtatagtagattcacatgggaatgctgtttccttgacaaccaccatcaacttgttgttcggttccttagtacacgacccaaaaaccggggtgatcttcaataatgaaatggacgatttcgctcaattcaacaaatctaatagttttgaattggcaccctccatatacaactttcccgagcccgggaaaagacccctatcatccactgcacccactattgtgctgtcagaattaggcatcccagacctcgtggtcggcgcttccggcggctcaagaatcactacgagtgttttacaaacaattgtgaggacgtactggtataacatgcctatattggaaacgatagcctatccacgtatacaccaccagttactgcccgaccgcatagaactggaaagcttccccatgatcggtaaagccgtactaagcactctcaaggaaatgggatatacgatgaaagaagtatttcccaagagcgtagttaatgctatacgcaatgtcaggggagaatggcatgcggtgagtgactattggagaaaaagaggaatctcctccgtatactaagatgtggggtaagaatggtactgtaatatagttcaagataatagtacgtaatgtagggagcctgcttctgtggtatataaataaatactgggcttgcgtttatttttaaagaatcaatatttacttttcattaacaaagggcatacgcccttaaaacaaaacaaaaaatccagatcatgcgagctttgcctttttcagtaagtttccctaccttgcagccgagacgcgacttcggaacgatgccagcatacgtatttaccattattaaaaaaatctgatggcttgatactgcgcgtttctttttatagcattaatacgcacacatacgcgcattgttgtttactataaataaaccgtggggacctgacccagtcatcctccctgtgtttacagtgcggtgcacacgagcctgagacaagcccgtaaccaggcgcgttgccgcaaatacagaggcgccccagacaacaccgcagtgtgaagcactgtcaatttaaaaccgtggcttgctggagatgcccagaccaaccctgttgggtttttctctcgagcacgccgttataattttagcgtgttccgtacctgtgtgcacatcaataagcggtgtaacaaacttgaacttgccatctcatatcgtcatatgagcagttgcagagaaaggcactttaaataaaaaggcgtggatgataaaaaatgtatataagttggatggatttttgggaaaaagtaatgtttttgcagacgttttaaatactccctcccttttcttagtaatttttattatgtattgactaagtcaaaaataactatagaaaactaaagtttacgagaggacccaaaagttttgaataacacgtgcctttgattttttgtttactttctttttctagttaattaccaactaaaatgctttcgcttaaaacgttactgtgtacgttgttgactgtgtcatcagtactcgctaccccagtccctgcaagagacccttcttccattcaatttgttcatgaggagaacaagaaaagatactacgattatgaccacggttccctcggagaaccaatccgtggtgtcaacattggtggttggttacttcttgaaccatacattactccatctttgttcgaggctttccgtacaaatgatgacaacgacgaaggaattcctgtcgacgaatatcacttctgtcaatatttaggtaaggatttggctaaaagccgtttacagagccattggtctactttctaccaagaacaagatttcgctaatattgcttcccaaggtttcaaccttgtcagaattcctatcggttactgggctttccaaactttggacgatgatccttatgttagcggcctacaggaatcttacctagaccaagccatcggttgggctagaaacaacagcttgaaagtttgggttgatttgcatggtgccgctggttcgcagaacgggtttgataactctggtttgagagattcatacaagtttttggaagacagcaatttggccgttactacaaatgtcttgaactacatattgaaaaaatactctgcggaggaatacttggacactgttattggtatcgaattgattaatgagccattgggtcctgttctagacatggataaaatgaagaatgactacttggcacctgcttacgaatacttgagaaacaacatcaagagtgaccaagttatcatcatccatgacgctttccaaccatacaattattgggatgacttcatgactgaaaacgatggctactggggtgtcactatcgaccatcatcactaccaagtctttgcttctgatcaattggaaagatccattgatgaacatattaaagtagcttgtgaatggggtaccggagttttgaatgaatcccactggactgtttgtggtgagtttgctgccgctttgactgattgtacaaaatggttgaatagtgttggcttcggcgctagatacgacggttcttgggtcaatggtgaccaaacatcttcttacattggctcttgtgctaacaacgatgatatagcttactggtctgacgaaagaaaggaaaacacaagacgttatgtggaggcacaactagatgcctttgaaatgagagggggttggattatctggtgttacaagacagaatctagtttggaatgggatgctcaaagattgatgttcaatggtttattccctcaaccattgactgacagaaagtatccaaaccaatgtggcacaatttctaactaagtcgccctcagtccgctcattttagctgaattttctaatgttatttttcatcagcaaaacttaacagaacgttaatttatctaccccttttagttcattatctcttttttatccaacattttacagagatctctcacttaagtctaagtaaagacattattttatatggtacacttatagaatatacgataataataataaaaactatgtaacataaccttcagaatttaatattagtttcctttttacctcattgcactaataaaaaaattctacagaatctccgaaaaagaaaatccagcttactctttttgttttcttcttcacacgtgagcttttccgccggcatacgttccgttccgtgtcgtcttgcataaaatttccgaatcacatgttcgtaaaacaaccggaagtgccccgaatataaagtcaattctcaccgctgttgtaactggagctttaaggtgttatctaaggaaggataaaagaacttaaacaacaacaaacaaaaaattaagttacaatgccagcattattaaaaagattattgtttcaagtgggtcctcatccaaacgaaagaacattcaccttatcctctgtttcaactgatgggcactatatttccttgagaccatttgttaagccaagcggtgatgagttatcttttcctttcgaatgggcctttgccggtacaaacgaaacagttaaagctaatgatcaaggaaacggtgtcgttactcaagatttcaatttctggttggatacaaatgtgtacttgaacgttccaaacacccatcgtggcgaagtgaacaccacttggaaaaattgggattctggttgtgtcgaggaaacaggcgctgtttacccattcggtgccgacaaagaaagcgtctctttcagagaattgtggcaaccagttgacccatcaagagaagatctagtcatcgtctcaccaaacaatgagaagttctcgtcgaatgctaggtcaattgtcctcaaagttactgacgaagcttatgatggtttggttattgttattggtagatggattcaagggtttttgtcccaaaagaataataacactattgaaggcttgaacttcatcagattacttgaaaaagattcaggtaaatctgagttcttattaagctacggtaaggaagtaaacaaaattccacaaagctacgaaaatttgaagaaaggttccactgtaaccagcaatgggttgaactgggaagttattgaatatcacgcttaataaaggagaataaatcgttttctactttcttctgctgctataataagcacctatgggatctatatagtatttttataacgatagactttataaaagaaaatacctaagtgaaaatttggtgaattttgagataattgttgggattccatttttaataaggcaataatattaggtatgtagaatatactagaagttctcctcgaggatttaggaatccataaaagggaatctgcaattctacacaattctataaatattattatcatcgttttatatgttaatattcattgatcctattacattatcaatccttgcgtttcagcttccactaatttagatgactatttctcatcatttgcgtcatcttctaacaccgtatatgataatatactagtaacgtaaatactagttagtagatgatagttgatttttattccaacactaagaaataatttcgccatttcttgaatgtatttaaagatatttaatgctataatagacatttaaatccaattcttccaacatacaatgggagtttggccgagtggtttaaggcgtcagatttaggtggatttaacctctaaaatctctgatatcttcggatgcaagggttcgaatcccttagctctcattattttttgctttttctcttgaggtcacatgatcgcaaaatggcaaatggcacgtgaagctgtcgatattggggaactgtggtggttggcaaatgactaattaagttagtcaaggcgccatcctcatgaaaactgtgtaacataataaccgaagtgtcgaaaaggtggcaccttgtccaattgaacacgctcgatgaaaaaaataagatatatataaggttaagtaaagcgtctgttagaaaggaagtttttcctttttcttgctctcttgtcttttcatctactatttccttcgtgtaatacagggtcgtcagatacatagatacaattctattacccccatccatacaatgccatctcatttcgatactgttcaactacacgccggccaagagaaccctggtgacaatgctcacagatccagagctgtaccaatttacgccaccacttcttatgttttcgaaaactctaagcatggttcgcaattgtttggtctagaagttccaggttacgtctattcccgtttccaaaacccaaccagtaatgttttggaagaaagaattgctgctttagaaggtggtgctgctgctttggctgtttcctccggtcaagccgctcaaacccttgccatccaaggtttggcacacactggtgacaacatcgtttccacttcttacttatacggtggtacttataaccagttcaaaatctcgttcaaaagatttggtatcgaggctagatttgttgaaggtgacaatccagaagaattcgaaaaggtctttgatgaaagaaccaaggctgtttatttggaaaccattggtaatccaaagtacaatgttccggattttgaaaaaattgttgcaattgctcacaaacacggtattccagttgtcgttgacaacacatttggtgccggtggttacttctgtcagccaattaaatacggtgctgatattgtaacacattctgctaccaaatggattggtggtcatggtactactatcggtggtattattgttgactctggtaagttcccatggaaggactacccagaaaagttccctcaattctctcaacctgccgaaggatatcacggtactatctacaatgaagcctacggtaacttggcatacatcgttcatgttagaactgaactattaagagatttgggtccattgatgaacccatttgcctctttcttgctactacaaggtgttgaaacattatctttgagagctgaaagacacggtgaaaatgcattgaagttagccaaatggttagaacaatccccatacgtatcttgggtttcataccctggtttagcatctcattctcatcatgaaaatgctaagaagtatctatctaacggtttcggtggtgtcttatctttcggtgtaaaagacttaccaaatgccgacaaggaaactgacccattcaaactttctggtgctcaagttgttgacaatttaaagcttgcctctaacttggccaatgttggtgatgccaagaccttagtcattgctccatacttcactacccacaaacaattaaatgacaaagaaaagttggcatctggtgttaccaaggacttaattcgtgtctctgttggtatcgaatttattgatgacattattgcagacttccagcaatcttttgaaactgttttcgctggccaaaaaccatgagtgtgcgtaatgagttgtaaaattatgtataaacctactttctctcacaagtactatacttttataaaacgaactttattgaaatgaatatcctttttttcccttgttacatgtcgtgactcgtactttgaacctaaattgttctaacatcaaagaacagtgttaattcgcagtcgagaagaaaaatatggtgaacaagactcatctacttcatgagactactttacgcctcctataaagctgtcacactggataaatttattgtaggaccaagttacaaaagaggatgatggaggtttctttacaataaagaagcacatgtgtgttaacgtttttagtatttgcttgttatgtaaatcaggaaaacttcgcgggatttggttggatgctactttccatacaataaatattatagatctaaaaagccaaattacaagtaaagattagtaaagctgttggaattccatcgttgataaaaatgttagttattaaatataaaagtcagaataggtgaacttggatttaattgttggcatttcgttgctgctagaggccataatattagatagccaggacatactagttctcctcgtggtataggaatccataaaatggaattggtgattctatgtgatatattcacattcttactacattatcaatccttgcacttcagcttcctctaacctcgatgacatcttctcataacttatgtcatcatctaacgccgtctattataatatattgatagtataagtattagttgatagacaatagtggatttttattccaacagtgtctttgttcgtctcagatatagtcggattgcccttttaagcaatcaatagtgttttatttgcaacaatgtcgtcatagtttaatatgtcctataagatgttaacttgctcaacattcaacaaagtttggtctcttggcccagttggttaaggcaccgtgctaataacgcggggatcagcggttcgatcccgctagagaccatttatttttaaattcgaccgtctgacagacggtgcacttattacttaatttttttttttttttaatcctcgttaaactgagtacataatcagcaacaatataatataaaagttttgcttttttatgtacgtacaataggggtacttaaataaataaataaacaataaaacaatcaataaataaataatatacgatcataaattacgagatatatttcatagtcttgacttctccagccgaacgtcattaaatttaaggcagaaaagataaacaagggtacggtgtacagaagacaaaataaataataacctttaaaagattataacaatgttttcattatttcttctcatcggccttaattttatttaaggcagaaccatatttgaaccattcaatttgctcatcgttgaaagtatgggtcaacacagcatcccatggcttaccattctttggatgaactctcattgttacaggcttacctggagccaattcagctagacccagaatatcgattctgtcatcagggttgatcttgtcatagtcagctgggttcttgaagttcaatggcaatagaccttgttttttcaagttagtttcatggatacgagcgaaagactttgtgatgatagcgaaaccgcccaagaatcttggttccaaagcagcgtgttcacgagaggaaccttcaccaaagttttcatcaccaataacaacccacttgataccttggtctctgtaatctctagcagtgtctggaacacctttgtattcaccagtatatacatttttaacacagttagccttcttgttttcagcattaatagcaccaatcatatagttattagaaatgttttctaaatgacctctgtatttcaaccatggaccagccatagaaatatgatcagtagttgtcttaccgacggccttaatcaagattggcatgtctttagcatccttaccatcccaaggtttgaatggtttcaacagttgtagacggtctgaagttggagaaactttaacttcaacggtgctacggtctgcaggtggagcttggtaagtgttctcaccagcatcataacctctttgaggcaaaccatcaccatgtggtggtttcaacatgaactcattaccatccttgtcctttaatttgtctgttagagggttgaatctcaaatcacccgcaatggcgaacgcagttactaattctggagatgcaacaaaagcatgagtttgtgggttaccatcatttctagaagtgaaatttctgttgtaagaggaaacgatagtattcttgtcacctttcttgatatctctacgatcccattgaccaatacatgggccacaggcgtttgccaaaacgataccaccaaattctttgaaggtttctaattggccatcacgttcaatagtggctctgatttgttcagaacctggagtaacagtgaaaatggtcttggatttcaaaccatgagcagcagcatccttgacaatggatgctgaacgagacatatcttcataagaggaattggtacaagaaccgatcaaaccgactctgacatccaatggccagttattagcaacagcaacttccttcatcttagaaactggagtagccaaatcgggggtaaatggcccattgatgtatggttccagagtgttcaagtcaatttcgacgacctcatcgtattcagcatccttatcagcagataataggtccttgtggtataatttagcaaagtcagcgatcttaccacgaccagttgcttccaaatattcaatcatagatttgttgaatgggaaaacagatgtggtagcaccgatttcagcacccatattacaaatggtacccataccagtagcggagaaggtgtcaacaccatcaccgaaatattcaacaattttaccagtaccacctttgacagttgtgataccagccaatttcaaaataatatcctttggagaagtccaaccgttcatcttaccagtcaacttaacacctaagatctttggagccttcaattcccatggacgacctgccataacatcaacggcatcagcaccaccaacaccaatagccaattgacctaaaccaccagcatttggtgtatgggagtcagtaccaatgatcaaagcacctgggaaagcgtagttttccagaacaatttggtgaatgataccggaacctggcttccagaaacccatgttatatttcgcagtggcagaggccaagaaatcataaacttccttgtttagatctatagctctcttcaaatctttttcaccaccaacttgtgcttgaatcaaatggtcacagtggacagtgactggcttagcaacctgtggtaaaccagcggacataaattgtaaaatagccatttgagcagtagcatcttgacaggcaacacgatctggtcttaattttaggtatgaaacacctctctgaatatcttgaccatgagggtcatccaagtgaccgtacaaaatcttttccgcgtaggtaaatggcctgtttaatctttttcttacgatatccagcgtttccacattctgcttgtagttaataaaagaatgatcttctaataagttttggttgacttttgaatctctagtcaagttggagactgtcgcaagaccacgaacaatgggtctcttgatggcagaacgtgcagacagcattgtatatctatagtaataatggtagtatttattaccttcgttctactatgtaataactaagaaagagtgaacagaacaagggacaacggaattaagcaacatactcctcctaattaacctctaaaaccggaagattatatatataacaaaagattttccttgtcctccctttttgtgcttgcctttccgaaaaccggcagcgattggaggtttgatggttaaagtcgcctgcggagaacaactgaagggttcaaatttttctcgtatgcactaatttctctattgattggtcaggacctttgccgatttcggcgccgaaatgctcgaaaaacaaagggtattgcccggccccgcggacctcccttttgcggctctcggccattttttaggtaatttgacaccgtgcccaaatggcttggcacaatcgagaatcaggcacccgcgtgtgaccggcgtcattcattaaagccagataagacaaagtaaaatacaatggattatgattaatacaatgatatacaaaaagagagaaaataaacgaaggctacgtctgcgtaattgacgatgggaaactggtatttttatataagcatatgtaaagtgcgaagtatatcagtacggaatgccatttgtgagcctttggaattcatcataacctttagtgaatatactttcataacttttacggattagcgccttcatatatagtgcagcttcgtgatcggttttttgaggttgaaatcttgctcttagattcctaattgtcttgtgacccttaaagcaggggagaccgcttcctaacataggatttacacactcaattatggcctccacgtgcggacgggcggctagatatgccttgatacaaagttcttcaaagtccagatacgctggggtctggggcgaacctcccatcactttaaccatttctttcgtcagcttgaatggtactgcttcaaacttgataccacctgggacaatatcaaaaataaacccaaaatcgatatgtagacaatgtccttgatcatcgtacataatgttaccattatgtctatccttgaattgcaacaaatacgaaattacgctatatcccgctaaggatttaacaaagttgtttcgtgcgttttgaaattcgatagtagattcattaccaaatttactagtgaaatattcatataatccattaacagcttcacgtcctaacatatcacgggataccgaattgggtagcacatcgatgacaccacaacccggtgccgtcgcagtaactctgtagggaaaaacgtagacatccaagccaatactagaccaaatggttctaaatagcgagatcaattgtaacgctagaacatcttgcctacagtcatcaccgactttgaagatagcagcttgccatttttcaacttccttgtttttacctgtcaaaggatcttttacgtctttctttattttaaaggtcgccataaaaggcgcctttgcgtgagattgaagtggcttaccactcttccgatcaatatcaataactacaccgtcaggattagaaggtaaataaacatcaggtttcacctcaattttgctcatttcttcatcgatcttatgtttcttttcagccttacttttttttatgtatggtttcaacttaccagatatgccagttacttcgtcgaagaattcaaattcacgttcgtaaaaatcgcgatgagattggctgaaacttgaaaccatacgctccctaatacgatctagagttggtttgatttcatcttcttgtataccttcatcatccttgtagcagtttgcaagcatattccagattatttgatgagaaaataacacactaattttcgcagtatccaaaatcaatctttcgacatatccggttttatcgtatctcaaacattgtacgatttgaggaacatagaagaatgccaagttcacatcttgtgattccaacgaatatatgctgaattgtaagataaaagaattaccttgccattcgggaaggaaaaggttgatagattttaacgggctcactggcgcccagtataaggttgcgtgtaggtctttcttactgctcaggtggcttccttttatgaacaggtcaagagcacttggggaccccacacacattaaagcatgttttgcaactaagcccactaaaacatcctcagctttcttgctataacatcgttgtaagagatttattgctaatgttggatctttagcaaaggtagcttcaacgatatcgcttgtaagctcgttgctgtcggctccttcaatcttctcagtcggagtaagccaggtttgaatctgctggatttcgcttgccaagaaatagttcaggatcttgtaatctttcccgcaatgacgtgacattagcgagcttaatttgttgagctgaaggaaaaggtccctagtaacagataaatctgctttgattttcagctcatttgagccgaatggccacgctactggtcttttaaaccaacttagggcaccgtttgtgatttcttgcgacaaacggcccatatacttggatccctgcttataacttgcgtttagtacgagagtcgcgaataacaataattcgtggcgaatcattctagcgaacgggtgtagtgaagccttatacagattcttgataccataaagcgcacatttcgtgaaaattttcaataaaaagtcactttgaaatagtgtgccctcgaaatgggaagcaaaaaatttaataacatgaagatgtggttgcatagcttgggatgcattttttgcatctctgttgatacctgctttgtcgtaaggggaatattccattttttggtattcttcgccctttaagtcatgatcgcgagaatagagaccaatattgtcatcaatggagcgcatccagcaatagcatacttcaactaaaagcaaatgtgcaacttcgggcttctcagttatgattgttaaccatacgtttgtagcaatctttaaagatgcagaggtgaagacttcgaacgggatgtgcacaatatcatatatcaatgacgctggtgcaccattgccaagaattaacaacgcggtagccatatcaagaaaatcagttacgtctttagttataatcttatttcctaaggtcaaattttttcttatgttttgagtggaaatacctatttgccttttgatatcctctggtgatgatgtaatagcggtatcgaaaagatattttgacctccaagaatgtaaagatataaatccagaaatcgtgttaggtttctctggaccataataagtaagccttgataattccttatctgcaggtaaaatcaaaccagccatatccatggcaaatgagacaccaaattcaacagaatttagcctgctgtactcaccgagatctgatatgtatgattgcaacaaaatcttagtatcctggttgcttctattcaatagaattcttacccattctttagctgacttgtgcaatcttgatagtgtcgtagcgcgccaggacgatgagcttggaaccaatattgttgtcttagaatgttttaatttaaattcataccgtggttcaaatttatgcgcctctgagtccaagatactatcaaatagggctgttaacatatctaataaggtgtagagagacaaatgatgacataacgatgatggaatagatctgataaatatttcacaggcatgaaaagcggcatcctgcaaagttggttccctatgagaaaggcaaagtagcaagttattaagttgttgagcaatcattttggagttgaatatggcatcgttacccttttgaatcaacctagcatattttctaatcatggaaaccgacaaaactgcaatacacttctcaattgaaccggaaagaatggaggggtctgagaagtacagtagagtcttcgaacaatcacctgcctcgcatcttatcgtttctagaagaacggcagccgctaaaaacatgattttagacgatgaagttgttctgtactgaacaatattggtattgaaatattcggttatctgctgtttttgttgtttgatattttcgttagatgaaccgcggcgcaaaattgtattcatttccaatgaaagctccttgttattagcaggaaattcagaagccagcggtggtgaattataggcaatagttaataagaaagaaaaatttcgtttgacaataggcccgcccaagtggtacccatggatgacaaaattaaaccaggcgttcctaaacttgtttgtagtgacttcatccttattgatgtccaatggcgtatcgcctggaacaggtagtagagcggcgaggggctctaagtaggtagcgatttgatcagcaacacgggaaatctccgtttgaggtctgtgatgttccaatcgttctacttccccactggcaatgattgagtccaatagatcatgaagatacatgaaatataagtcacttgaaaaatgcctggccaacaattcttttgatatcacacatttcgctttaataatatttttcaatagtgcgctatcatcaatttttgttgcaataacagttctcgatttgaagaactttagtaaaagcgaaaattctgtcagtgaagtattcggagccagtcttgccaaagaattcaaaataacaccgtctaattcctttgacatagaattaactttttgcgtaagaatagagatagtcaaagctgttatgctttgggtgttatagtatgaggcgattgtagtcgttgcagccacacaattagatatcaaagaggcatggtatgtcatagtagctccactattgacatcatgggaggaaagttggcccacagttgtatttccgagcagagcaccagtgccatccaaactggcagatgaatttcgcaagggaaagtagtctttctcaatattttttccagatgttattgttaattggcgctcacggagcaccgggacgggcgatccgtcctcggaaacagctaataagttgttcatggaataaattgtactcacaattgcatcttcatttagagggtataaccctgtggtgaatatttttgcaacatcattaactgtttcagtcgtgatatgtggagacgctaccaataaaggaaacatacgaatcagagttaatgacaatttttccgtgaaaaaattcagtaatgaggcagaagctacaattgcttttatcaaagatggtgtaacgacatcagataagaaaaatttatcaatagattcagaaacaacgtttgtaaaactttcaaaaagctcgctttctgtatcttctataaacggaattaaacatagcgtttgtaggtagtgggctcgagtatcaaaagaaaatcttgcacggttgtctgtagataggtcgagaatatgtgactcagaacaaaattgcagggaaattttacacatgtctgtaaaaaactgtttattgcttcttacgttgaaaaaaaagtcatcaatacacttcgtatcatcgttttcatcggctacttcttgatcaaatttgtaaaattggtattgttgatttagtaagaactcactcaagttggcgccgacatgtgaagtgtttaacagatgagatattagcgaaacttgcaagcgagatattaattccaataagtaggcactggatagctcatttccagcatcgtaatactggacgattgaatcattggtaaacgttgctgaggaattcaaaatcttatcaacttcgtttagaaatgatccacgaagcacaagtttcgctaactttttccaggtgaatttagtaagctctgtagagttgggaaactggataaatgcattaataaagcccactaatgatagtagaccagattgtttaatagtaaaaatctttaatacacgctcaaaataagttgaaatgatgccgcctatattttcataaagaacgggatactgttcacaagcttgaatcataaacttagtcagctggaaagttagcaattcaatcggatttctcatctgttccaacttgaatttcgaggacagaacatctgaaattctttgtcttggagtttccagaaaataaggcgcaattatttctttaagcattgtctctaccagatcgagcgtggtagggattgcaacacaaagcgaagttagtacttcccattcactcaatgtaagtggtatagtatatatctttgacgtatttgtggaataaaaaataggcaatgtatgagttatcaaatctaatgttgtaccattactgttttgatcatttggtgcacccgtcgaaagtttagttagtcttccaatagctttcgctcttaaagatgaagaggctttcaatcctctggtaaatctcatctgccttaaacgagtggcgttttcgattgctgtagttatctttttgtgatctaatttttttcttgatttacaatagttattaatgttgaatatgttttttcccacaactcaaacatcttcgcagtattcttgaaaaaaaaaaatactattaacgtaccttcatccctgcgcgtgccgtttgatgatatcagccaaaaggtaaaatgagatgaaaaaggccaatcattcataaatgtacttagagacattaaagaatcagttagagaatataaaacaagataataaaaatggtacgtagatgcaactatatctttccgtttctcattggcggtttttagcgatcgaaaatactaacataatctttttggggggtgagaatgtatatgtgtactggatatgtatattcttggctttattcaaatagttgaaattacgccaattacaaaagaaaaagcaaaaagaaaatgaaaacagcagttctattcagcctaatttatcggcagcaagaattcgtttgaaaagggaccttgattcgctggacctcccaccaacagtgactttgaatgtaataacatcaccagatagtgcggatagatcacaatcgccgaaattggaggtaattgttaggcctgatgaaggatattataattatggatctattaatttcaatttggattttaacgaagtttatccgattgaaccaccaaaagttgtatgtttgaagaagatctttcatccaaatatcgatttaaaggggaacgtttgcctaaatattcttcgagaagactggtcgccagctctagatttgcagagtattataaccgggcttcttttcttgttcttggagcctaatcccaatgacccgttaaacaaggatgcagcaaagttactgtgtgagggtgagaaagaatttgctgaagctgtgagattgaccatgtctggaggttcaattgaacatgtcaaatatgataacatagtttctccttgagtcaagttcagagtaattttcggttgatttgattatatataaacaataaaattatagataattgtgacatactaggcgagttgtcgccttggtaacatcttgctaccgccatcttctgttagtttacgccttatgaccaacattccttatattctcgttcaaacttttgtctcgatattttgcaggtacctgtagaacttaatgtgttctattcaaaataagtataaaatttctggccagtaaaggcaaacaaaacataaagatattaatacgaaaaatttcttgaagaaaacaaaaaatacttcttataataaagaaacagcgaagccatggctattgacaagataatcaggaaggtgagataccctggatagaagactaagagagagcaggaagttgaagaacgcaatctcagctatcgctaattcttacaaaaaataaagatattacaactatggaagaaaaaaatgaatgactatactagttagtaatatttaacaagataacgctttctattttctgtaaaaaaaattctgtctcatgcacttggaagcagcttcaacatttctcttttccagatgtcacattttccggaccggccgtcattcaatcgcaattaaaagagaaaaataccaacaagtgggttgatttacttttgtgttttcaaaaagaccaatagttctaacaaagtagatgcttagaagtaagcaaagtggaatatagagaaacaaaattaagtgatagatttacttttacacaagaaaagagatgaaaattttcaatacaatacaatctgtgctgttcgcagcattttttctaaaacagggaaattgccttgcgtcaaatgggagtaccgcattgatgggggaagtagatatgcaaacgccctttccagagtggttaacagaatttactaatcttacacaatggcctggaattgacccaccttatattccgctagattacataaatcttactgaagtgccagaattagataggtactatcctggccagtgtcccaaaatttctagagagcagtgctcatttgactgctataactgcatcgatgttgatgatgtaacttcgtgtttcaaactttcccaaacatttgacgacggtccggccccggcgacagaggcattgctcaagaaattgagacaaagaaccactttttttgttctggggataaacactgttaattatcctgatatatatgagcatattttagagaggggtcatttgattggtacacacacgtggtcacatgaattcttgccaagtttatcaaacgaagaaattgtagcccaaattgaatggtcaatttgggctatgaatgccacaggcaaacatttccccaagtattttaggcctccatacggtgcaattgataatagggttagagctatagtaaaacagtttggcctaacggttgtcttgtgggatctcgatacttttgattggaaattaatcactaatgatgatttcagaacagaggaagaaatacttatggacataaatacttggaagggaaaacggaaaggtttgatcttagagcacgatggtgcacgaagaacagttgaggttgctattaaaatcaacgaacttattggtagtgaccaattgacaattgcagaatgtattggtgatacagactacatcgaacgctacgactagaagtaagatttccgagaaataaagtttctctctatatatctttgatctcttatttaattattcaactcgcaaaaataaaaagaatattttgttatttcaaaagtaaaaaagtatgtattagaatagaggacatatataaaaatcatatatatcgatgcttgaatgtataaggaaaagcgtcaaattatgaacggtaggtacttaggatgctgatgtcacataaagtcagagggtataactttaaaaagtaattttttagaatcttttagcgtcaaaacgttacacgtacatttgaacagtgttaagagtagattaattcaaattatacttttacgtgctccgatacagtctctacctcttcgttgtcagtgcaaataacaattggcttatcatgaactgttcttggagatggagaatatcctttcagactcgtaatattgatgacggtagttattctgcgacattgagtagtactagcatcccttataaccggaatagttgttgatgtaggtgaactttttgggacataacacttggcagttgtttgcaaattttttgtgatcattgatatgtttcttagtgacatttttgatgctattgtttttatagtgtaattgctatgagtttattttgttgacaagtatacttggctgtcttttttatataataacgaaaatgtgtagtggaaaagcaggtgtgttttgtcttatatcttacaaactatataggcttatatagttttttttcaaagattcttattactgcacaaaaaaaaataagatcccaaattgaacattaacattagtcatattcagggatggctcatcacgaacagcaaactgaataattttcttgtctgcgttcctttttttgtgcaccaatggatgtagtatgcgcacctgatgcgcataatagattgcaattacactgactacaacttacgtatatgcgtttttattacttttctattgcaacggcctaaaggaattcgataaaagaaagagtaggcaagataagcctgaatttggctttcggctgttatttttacttccgctaaattttctttgttcttccattgtttttttgcctttgtgttctccattaatccatccaattttaatgtcggattaatggaactttctattaacccataaatgccacatagtacggctgtagcagtgaaggttacaaaaggacgggtaacacatgagaaacatgcgtcagggaacaaactagatatttgattttgtgacgcaacgcaaaaattactggctattcttttgtagtattatcaaaatccatttaaaatattctctctccttcagtaatcctctattatttatcaaaaacccacagtgggtaaacaaactgcaaaagagttgttattatttctacggatcggcaattgaaaatgagaatacaactaaatacaattgatttgcaatgtattattgcactttcctgtctggggcaatttgttcacgcggaagctaatagggaagatttaaagcagatagactttcaatttcctgtattggaaagggcagctacaaaaacgccttttccggattggcttagtgcatttaccgggttaaaagaatggcctgggttagatccaccttatatacctttagatttcattgatttcagtcaaattccagattataaggaatatgatcaaaaccattgcgacagtgttccaagggactcgtgctctttcgattgccatcactgcaccgaacacgatgatgtgtacacatgttccaaactttcccagacatttgacgatggtccttctgcttccactactaaattattggaccggttgaagcataattccaccttcttcaatttaggtgtcaatatagttcaacatccagatatctatcaaagaatgcaaaaggagggacacttaatcggctcacatacctggtctcacgtatatttgccaaatgtatcgaatgaaaaaattatagctcaaattgaatggtccatctgggcgatgaatgctactggcaaccatacccccaaatggttcagacctccatatggcggaatagataatagagtaagagcaataacaaggcaatttggcttacaagccgtcttatgggatcacgatacttttgattggagcctccttctcaatgattctgtcataactgaacaagaaattcttcaaaatgtaataaactggaacaagtcaggaaccggattaatattagaacacgattcaacggaaaaaactgtcgatcttgccattaaaataaataagttgataggtgatgatcaatcaacagtttctcattgtgtcggcggaattgattacataaaagaattcttgtcctaattttcagggaattgaagaaaataaggaagaattaaattacaatttaaaaagaaattgctttagtattttatatatagacatgcagcaacttcttgatatatttcaggaagaaaaaaactgtttcaatatatacgtatcttctgctttcagctacatttttacttcagagacataaccagtcttttttcatcagtactgtccagttgtaacaacatagaaattacaggaagtaattggttccgttgttccttgtgctccaaaaatcccaacaaaacattttttatatatgcaattttttcatttttctcagagtctaactccaatgaacttgatgatcgtatcttctctaatttagttggattagagttattcgctggtgaggaatcaatattcgcgttagctagagtaccgatagaaccagacctactaactcttcctgacttgtcactgtattgtctttcctttaaagcattcaattgagaggacaatgaacgataattttttagtaatcgatcaaatttcttgttaagttcgttatttaaattcagaagtttctcattggcagactgtagctcaaaattcttttcatcagccttagacaatgagagttttaaattagatgtgatctgttccaactgatcggaatcatctgaagtggcttgagtcttccttttgatgtcattgttaacatgtttcaatgcgtcaacctctgattttagtccctcttcacgaagctttaaagcgtgtatttccgatttcagctcagttactgtatgcttccactcttgtaattcagtggcctttctggatgtttgtaagtctaattctgcttccaatttattcttttcatccgttaaataggccaatttattctccaactctttttgtttgctcgaatcatctgtctgactgtccgaaactaaccttctcaatgtgttagcttctctggttttgtcttgaacaatattagcatattcatttagttcatcttctaaagataaaattttttttgtagattccttcaacttgacatttagttcctcacattgtcttttgatagaatctatgtgttcattcgaattactttttacattttgcaaggtattgtatttttcttgcaaaatattcaatctttccgataatttaccattttctttcaaatactcctcgtaggaattagaattctttgcgatatcattatgcagtgtctcattttccttttttaataagtctaatctgttagaaattttagcatgatcttttctcagctgttctgtggatttttcagccacgtccttttgctcactaaattgtttaacttgttcctccaagtaactcacagttttctccttttgtttataagaggttcttaaagaagtaagctcctttgttatgtttgatttttcgtaggtaagttgagatatctcctcatttaatttggctaccttgttctgcgatgtagtctgctctttctccttttctgtacataaattcttcagatgctctactttcttgctcaataactctatcttacttctcaactcagtatttttagcttcgtaggcctcgatcatcgttgcatttttatggcgtaaatcatcgagctccagcttaacggttttcacttcttcattttgtttactcgaagactctttaatctcatcttttgcgtccacaagctcattgcctacagtcctcagcatatctctcacctcctctagctccgaatttttttctttcaatgacttcttggtatcgatcaactcggtgttaagggtttccagctcctttgctgatttttcgagctgtgagttttccaattctttagcatcttttagttctgcttctatatcttcatacttttgcttccaatcttcacaatctttatatttttcttgtaattcttgcaaattttctttaagcttatcatattcttcagtattgattgagttatcgaccgtttcctcttcactgatatcacccgtagttatgcctcccttatttttctttcccttgtttctattctttttccttctgttattgtttcctacattttgatgagatatcgccttcggtaactccttcatttttttttccaattcactcagcttgcgctctttctcttttaaagtaatatttagttctgccaactctgaggacttttcctccattatagtacttttcgaagacaaattttgctccaattcggttatcttcattcgactgtcctcgagagaatggttctttatagccaattcttccttcagttcggatatagatacttcttctttctgttttttggcctccctttcttcctttagtatattttccagtgcaactattttttctctcaaacctgaaacagtatcatttttttctttttgtacagtatccaattctatgtttaaagcttccatttttttttttagatcgtctatgtcatttttataattttgctcttttttcaaaaattcctcttctttatccttcagagtttcactagaggcgctttctggaatttccgagttctgcttagttaatctcttgatctcatcattcaataggttatttttgttgtttaaatcctggaaaaaagctggcaacgtatccactgcgtcgtcaatattagatatgggtgtattttccgctaaaatcttttcaacagcctctaacttctctgactttaatttttcatttttgtatgcggagagtagcaaagggtatttttgttcatatttctcaaattttcttaatttagcttgtatttcttttggcaagccactcttatcatcttcgatttgttgttctgacggggtagggctcatatcatcggctaagcccttcgctaattcatcggtaagattcttaccaatttgtgacagctgtttgaacattgaatcagcaaatgtttccctaagttaaaatcacctcaaatgtaactcctgttgcttactatttgacgtttctgctacatttggttctcttatattgctggatctgaaaatccgaactatgagaatgcgggtaatagcttttcatagaatcactaattgatattttttcaggtaataagtttcctctaatcgggcatttaaaatcttggatcgataacttaactgggtgtaataaaatatataaagatataaaatagatatatatatataaaacgaactttatcaagaagaactgcaaatgaagcgtactctcaaatcctcgaaaacgaaaaacactccaccagtacagtattatcacgaagaatattaagtaaaagcagccatcttaaataatagagtgtagcaatcaaacataaagctaaggttcttcttgattagcaaattgtataaacttttatcgaaataacctagaaggaggttttttcttacctagcttcaaaaaattgccatttttatcatctgtaaattcacttaggaattttgcagtttttgtaccgctagcagaagaagcatgcgtactgcctttggtgtttcctgatctcggttccacttgcagtgataattgatactgcttttcaatgtgggggacattttccaaagacgcttctataacggtctgaatatcatccaatcgtttcagcttgtaatggaatcttttaaagcttataatttcctccactatatttgcgattttagtcctcttgctgaagtttattatgttggttgaattgtgaagaaaatctgggtttccgacaaacgtaaatgttaaatcagataggtatacaccaaaaaagggaacacatgcaacgtccgtcacggatcgcaacagctctctatacttcacaaaatttctcttggaatccataaggttgtttaggttcttcagaaggtccttcgactcagtggaaactaaatcccatgtctttttcagtcggtagattggggaggaatacaaagcggacactatggcagtcattgaagaaaaattattcaactctttacaatgctgggcaacggtaacaaaatattgcgttaattttgaacgtgtcttgacatctgcctgttttacaatggtatgagaaacaaaattagttagcgtattagcattagctataaatttcgtaatgttcggagaaccacccatattacaatacttggtaccccatgccctatccaagcattcaaacatagtgatcctgaggtataagtcatgttcaagtacagtcaattgtgtggcatatgtgtatgggtcaatatccaagagcttcaatttcttcaatctaaaaaacgctgaagaagcagaagatggtaaagaagacgaagacatgtgtatcggtgatttattgtcacgtttagttgtctgtacgactgccgataccgaatcttgttgcttaggatccactggttctttctcattctcatttatcagtttttcatttatcttttgcaaaagatcctctgcccccggtattttctccgatacaaccatcttggcaaaatttagaatcagtggtatgccaggttcataataatttcttgtccaatactgcgtcaaaaatgttctcataatgttgaccacacggcatttaatcgggtttgactttttttctatccaaatattgtaatcatcgtaactcagcccttcaggaggatacaagttgtacctgtaaatcagggcataaaaaaactctcttgtggttaatatacttctgaaagttattaacattgtaacattgaaagccgcatcaacaagttcatgactggttaaatgttcaatcagtgcctcttttgtcccgccacgaatttttcctcttgagtcatagacaagactagtttcataatctgaagttaaaaaccatggaaggtttttctctatgttcgcagctttgcgttcaatatagtcctcagatcctaattcgtcatcgatgatagcttcatcattttctgaatcgtcatcactatagtcctcggaataaatatcaaaccatttttcttgctcacctttcaatagttctgcagtcaaattattcttcatcattcttgctgcgtagttcagcaaattttctctttcttcaatcaattgatcaacaataatacacgcaagattagaaatctcgacatacttttcacaagcatctttaaaatcgtcggagttgtttaaaaattcaaggttattgaactccacatcttgactcaccaatacgtgaaataaggagagtgccaattgttcattttttttatggaaggggcccttgaccaaaggtgtattagagatattcttgaaaggttcatgatgtccgacagggaaattggacctcattgaggaaaacaaatacgggtcgtctaaggtcgtttgttgcgttgtcattattaatctgatgacgatgtcatgaaaagcctgctttatatcaaaaaactctgttagtactgaggagaccgaagacatggcgtgaactaaaaattcctcgctttccaaatccaacaaaatactgggtgtcttaatcaggtttttcaaattgatgaaaattgacagatctaaattctccagtatctccaatagtaaaacattctgatttatttgttcgtatgtgcttgaatttatttccaaattcctaattctgcttttgggtttacttataatttttaagtgttcacctgtagcattatttaatttttcaaaaatttgcgaggatttcttcttcattgtattcaaagtgtctacagttaatggatattttttcttcctttttgaaactcttgctcttgaaaaggttctgttatgagaaggacggttgaaaggtgtaaaaactgaaccagacgcggcactgcttgcttttaaatcaatttgggaatttgtttctgaattagcgctatatcctgacgcagaggcaatagcatctgccatctttggtggaatccttgatattgaggaatttttggacgacgaagcggtcacttcattagatgtgacagctttgttctttgtcgcattaccaaattcatccgtaataaaagtcgaaaatggatttgtccaagaaccaccgctaaatgaacctttaaaaaatcttgggagcaactgtggtaaagtattatcatctgagaagactgagctctgtaacacaaaataaagtaactgaacatgccttaaaaatttcgagaattccacatcaaccatttcgtaaatcgatttagctgacttaaaatttttgttggacggtgaaaaatcttccaaagtagaattttgtattgaagtccttggtgttacgacagaattaacactatttcttggacctaagactgagaaattttccatatcgttctcattgactgtactgaatgatgatctcattggagtcaatgtatccgttgtactggtacttacattacgtttaccggacaatggaactgaaactagatcatgtacactatctacttcaattttaccatcatccccttccgtcctagaacaattattttcctgattatcgttatccttgtcattcatagtatccattttttttctgtgaaaagctgaatcgaaatataaatgagaattgatacttatccttgacaatgaagagattagacctttgaaaatcttcttaatctccttgctgcaacttttggctttaatttcatgttgcattagcctgcagcctaactgtgtgaagactattgaatctgatatcaaatcaaagtatttcgtgaaattgagacgattctctttaaggaacatcttgtgagccgttttagtataataaactgttaggtcttgtaattctgtccacaattttatatctcttgaatagtgataaaagatgtcactcttggccagtatagaagagcgacttggggcaactacccttgattgaatattctgcgttaaatctggagcagataaagaatttaatgatgaaggaccagcctcattgaattcgtttttgttattttcgttattattatcatcatcattaatactgttattatttccatcagtttcttttgaatcctgtttttccattagaaggcttgatctattttgttcactttccgattgcttcgatctcgtagaactgtcctcaatattcgcatttttcctcagatctctagtatataggttaacaagatgatcattgggcgggaattttggttcgctgtcacaaatgtcatcggattccataattgagttagaaatcaagggtaattctgaacagtatatatcaaggtctttgttatagtataccaacttgtaatcggatgttttcgttatcagtggtatgggggaccaagtcgaagcaatgttcgaacgtataccattaataatcatttctatctcttccaacggtaatatcttaattgtttcttctgctactagtgggggacctgctttctcaccagaagtttgtaaatttgtttcattgttattcataattgcgtttgtattcatctcagatgagccatctgcactctttgtcatatcctgggatagactagcattggaattaaagttcgaagattgaggggttatgtgggaagcatcgtttggcgctgaaaagggagaattattcatcgatacggtgttattgtggccggaacttgtttctgcattgtgggcatttgataaagacgctgataaagtagaactccccctcctgctcttgctcggatttctaggcacatgtaaatatgcactattgcccaagctatttaagctgctgcgccttgagctcttactggaactatattttttcatcggatgactgtgctttctgagatgactgtctcttaaaggtctaccgaagttttgaggaaaccagcctctgttaactttcccattactgtcgtcaataactaatccatcccaccacccagatgagtttttgttaagtatataaatggtttccccttgttgtacagacaaaagttgcgaagaactgtcttttttaatgggataattaaagtcataagcagcgactactattccaattggacgaatgctggtcaactcacttgtcgagggggaagaagaaagagaagctgaggatgattctgtgttagtggtagtggaagtgttagatgaagagctgatcgatggagtttgtgaagcattgcctgcctcccttgcagaacttgtattgggaatagacgtgttagtatcggacatgatacaactatccaatatccaccttgctttttcgttttattttttagtatttattcgaagaaaaatgtggctctttttattcaatttctttccgaaaaagaaacagtctatctaactaaaggaattgcttcacggtgatcaagtcactataactgtctccgccgtgttggtgatgcagttttctctgtaacttttgagcttatttttctattttattttttcctccaggtctctgtcaaagatccgtctcccgcgatgtttaaaagtcgttttagcgaattacataataacctggaggtgactgacgtcgactattttctgccccataaagcaacaaaatatttaactcataaaagcttcgaagaatatgtaaatatagtagtatgaatctaactgagtaaaaaaagggaataacaaaacaaaaaaaaaggaaaagagatggatagcatacgttatgaaagtaataaaaccttagagatagagatagagagagagagagagagagatgcaccttttctattctcaataaaaaaaggaaagtaagtgtaaaaaaatttaaaggagggatatatgacactcctactaagcagtcgttttttttttcttttgttaatttcattcttcatgctgggttttggatgatctagtgtttgcacttaaaataattttttttcctgcattctgacatcgctttatacatcctcgaatgctgtaatttcaatccgaaccgtttcagctgctttacaaaccagttggtatctttgcgaaccttaaactgaaaaactcggaatggtttcattgacttgaaacgaagcttgcgcaactgcaatctggatcccgaccaacattgttttgctttttggcaagaatgatcgaaataccttttaatatgtggagaaaattgcctgtatttattatgaagtagcacaaagagccttttccagcggcgtttctgttctttatgcaatacccttaaactttcttgagcggatttaaaagaattcttgagaaataggtgtaactttattcttcctccgtttattttgttaattctcttgtgccaaccgtctttcattcgagcttttgttgtataccataaaataactaagtctgttttgtatcgtctccagcccattaggtcatcatcctttaatgggtatgcaatatgattgtcgaagtcgacgtagtattttcctgaaggagcccactgacttaaagagtcacttgatgaatcgtaagattttttatcaacaaaatcgatattgccgtacaacagcttcctttcattattacgtaatgactgttgtgatttaaaacctgccaacacatcaccagtcagggaatattcgagggcgaggtatgaaaaggtcatggaaagcaatgaagatagcatgataacatgccacatcttcaatttagcagatttaccctcacttttatctatgatatgatccgatagtgtgctagaattccttatcgtactatccttcagtttcgacccctccatacttggcaataccgttccgccaacatttgagccggacaaagtatcaaatgactctgaaatagtgggaactccagtttgatcaatattaactccagcattactaaattcattagatgttctaaaatcgtaaatacgattcatctgtgcagactcttcactgctagtgttcgataggacatctgcatcgaagtcctcgtcgtcctctcctgcaaaggagctttcatgcaaactatccaaagatatttctgacttcgatgactgttcttccccttctctccctttacgtaatctacgtaatctaactaaattccaatgatcgtcttcttctgacattttaggtccgacaactcgactgttttactagtctctattatcgtcactgcgtattactctgctactgtgcttgttactttataccggaacagtagctcctaaacgattattccaaatgaagaaaaacgtttggccagtaacctgcataaaactgaataactataatgatactccgactaataatatatcccaatgccccatctcatctgtgtagatcaatttttatggctcgatccaggtaccttgataagcagctgtcgcgcaaaggggttaccgcaaaatggatagatggaccgggggcacaccggggtagggggtccggagggttaactgtcaactccacccatacaagaccgcgcagaaatcgtcgcaggaccccgccgaacggcgaaagcaaatatgcagccgtaaagacctaacaataaacctaatgtagtcatagggctaattgattttaaatatatgacctagctgactattcaagtttgccctaattgatgagtttttgaaaaaaaaaacaacttaggtttcgctatccaagcttatgctatgggaagcgttggaaaacttgcatatagtatgaacaagagcgagatataaaactataacggtagatggaaagtaaagagtagacaagctcggaaacatggaaaatagcatgatgtttatatcgcgttcttgcggagacccgttactgctttgaactgcaatttacaaagcgttagaacagtcatataccttcataagggtccgagaattaatggtttgagacgagatccagagtcgtacttgagaaatcctagcggggtactctttactgaagttaacgcaaaagagtgtcaagacaaagttagatccatactacaattgcccaagtacggaataaatttatcaaacgaactgattttgcagtgtttaacacataagtcgttcgcacacgggtcaaagccatacaacgaaaaactgaatctgctaggagcacagtttttgaaactacagacgtgcattcattcgttaaagaatggttcgccggccgagagttgcgagaacgggcaactttctttgcagttcagcaatctgggaacaaaattcgctaaggaattaacgtccaaaaacacagcatgcacattcgttaaattacataatctagaccctttcatattttggaagatgagagacccaataaaagatggccacataaatggtgaaaccacgatttttgctagtgtcttgaacgcatttattggtgcaattctgtcaacgaatggatctgaaaaagcagctaaatttatccaaggaagtttgctggataaagaagatcttcattccttggttaacattgctaatgaaaatgtagcatctgcaaaggcaaaaatatccgacaaggaaaataaagcatttctgtgaagatacaaaaaatatagttgatggttcactggccaaaaatgtataaaagaaaaatttatctgtaaatagtgatcgaaataaaataagataataactaaagaatatatatgactttactgtacagatctataattgaaaaatgacgagaggtcctgtgaaagagtctgcctgttcgccatcttcacacattcaaccaattccctggtgcgcttggttacttccatcaggatatctgctaatttttgatagaatcgtttcttcccaagctttgtggaatcgcatccataagtacacaattccgataacttttgcgagcaatctgtgagcctttcaataatttctttacagtgctcgcctaaatccagtttaaaacttttttggaccattgctttggtagtcatatcaatcaccgattccaaaataggaataatctcgatggaattttgacataatctcgaaactgatcttgcggacttgaacaattttgatttagaggcttgaacatcattcaaaatgccctgcctgccataggaagaacaaccattgatttactctcaacaaattcgacgaggttatttatgttagcgttgtgcgtggttgagttgacatcagaattattcaagttttcttctgaagtagatattcttaatccaagaccagagttgggagcaaatttctgcactttctctctgaatttcctcattttggtcacggttggcgagtaaagtacgtctgcagctggcggaatatttgcatacggcttcgccgtttctgccactggtttagtgataactttcttcggaggtgatgcctgataatcctgccgaaatttaccaattagcggcaatgtgttaccttgaggacttggacttctcgagttcgagacaactttcagaggcaaaccttctcgcggagatggctcactcgtaattcttgaagaattcttagtgttttttaacggcgacacagacgctaagtttgtttctccagatgtattatttcgtaccttcccactctctcgaatagaagattcagatttttctatgatggaaattgatggcgatgctacaaccactggcatgtccgatttttttgtaatgggcttaccagaggatggaaaactaacagcagtactaccgctatcacccagagatgatatatccttaccgtttttctcatttttcactttttcaataatcttcaacggtttcatacctgcctcgatatcactgagttctccttcattgcgtgatatatcatcacgtgaggtggatttgatcttcacaatctgagcaatattgcagaacgcaaaaatcacttccgaaatagatgattgagctacaattcgtggtattaggtccccatatgtgagaaaatatcttgttgaagtgatagcatgagataaagcactctttaagtatactatttcgttttctaaagaactttgcagtgaaactgatgataggacaggtaagagatcgcctatcaactttgctatcttaattatagtctcaagcagaatcggcaggcgtgtggtggtggtatccacaggatcaattcgatggagcgtgttttgaaaataaagtgtaaattgagtttttaattctcggaagacttcaatggatataataccattcacgctcataaaatcatcgtttattttgaaggattcaaataatgtgtcatttaaatagaaatttagatcaccctcgtctaacccattgttatgcgtccccatatccaaatgatgtaagtttctcctttcaatttccgtgaaaatatcaagaatcaatttatggaacttcgcgtccttcaatcgagacagtttagattgtgctttacctcttttcagatcaagatcatttagtgatgcatccgcacccgaatctgtcaatcttttcatcaattcatcgttgacatcagtcgtcagttgccaaaattgtacattcgacaattttgtcaggtctttatttctattttggcggttttggttccttcttctatcatcttctggtacagaggcctctataattcttttgaaattcttataatccgatataaggtctatgatttgatcattcgttaattctgagctaatcattctttttatttcgttatggccacattatgatattcttttactttactgttttaattttatattctgcgattcaaatcataacagatatttagttgaataactctgtttttcttcatttccatttttttctatttacccttcttctttttattttacgcgtctcgcgttttatatattaatagtaataatatttaatagtgtatgtttgaaatttttatatgtctttatttcgctaacgtaaaaatcccttcttctttgtagggacgggggagtggttaacattgggagaagcactatttattgaaagttctagctgttttttcttgtcctccaaagcttttaattgtttagttaatttttccttcatttctttatgtctagcaaacaattcagtttctgatttttgtagttttttctccttttcggaaactttttgttggaaaactgttttcatttcaatttctagtttggctagttttgcctcatgtaaagttttttcttctagttgtttagatattggatcgaactctttgaaaactgaattatcttgcttaataccaagttttgccaatttagaagacctgtagttttcgtatagtatcttgcttgtcctttcctttaattcctccatgaattgcttgatcaataaatttttcaaaaggttgaaatcagagtggttgtcattgtccacttcgatcaccccccatggataggaacggcctctcacttgattaccactgtagttctctacaatatcgttggaaccaataacagcataaggtaaactactaaatagtctttcggataaatggctattttctgcatcatcgttggaataaattggaggcttgaacagctcgatattagattggattaactggttcataatggtcttcttgaaacttaagatctcttcatcagttaagatgtcagatttagcaatgacaggaatcaagttacatttttcatatacagattgcataaacttcaggtccaggggctttaagtaatgtcctgtaggttcaatgaaataaagacatgcatggattcttttatcgtttattgaatgtctgttgattttgttctccgcatccaagtattgatcaaaacgagagtcaatctccttaatgatcgggtcccatgatttttgatcattatttaaaaaatcaccaaatccttcagtatcgatcacgttcaaattcagtttaacaccattttcttcaataaccgactcatatgacttaattttgaccttgtgcctttgttcttgtgattggttctcgtgaccctcgccctgaccctcctcttcttcctgatcatttgcaagttcctcctcgtaatctttcactaaattggcctcaatatcatcattattaaataaagttttcattaaagttgtcttaccaataccatcagggccgacacataggagattgaaactgaatccgttctttatggaccttctgtgccattgcttgggcaaattagcaaaccctacataaccattgatttgacgacgaatgaacttaatctccggttggtcaggcagaacttgacccttttcgctctgagaggaggtgatgcccataccgaggccgggttccacctttacatcggattcagctgcctcaaatctctcgctgtcgtcattttgcgtaccgttcgtgtactgcgagtccactccatcatgatcctgcgactcttgtttgatctgaacatcattgaattgatcatgctgacgctcttcttgttccgggtcctgcttaatggacacttgttcctcctttaaactcatggcaacgtattataggccgatgtaatcgttcagttgtcgtgtgatcctggatttgatattttcttgatctgctttcctcgagagattttaacttaatacacaaaacaacacaaaacgcaattcctaaaaccgagacaaaaaatggcaaaaaatgggaagcgaaaacacgcccccaccatatcattacacacgtagatcataaaagacgaaaatactaaattagccgcccaggtggttcctttttacgaaaggaaggaaggagaaatctagaggtgctgctatatatgtttgcaaggtgcgagaatattctgtcacaattatcaagcagcaagttatataaagttgtttctcacagcttcttgcactcccttgcggtgcctttcctgcaccactagtgtaactgctgatgtcttccatttgatgtcagaatcgatttcttgttacgccacgaacagttaatatatagaattaaaggaatgatcttgtacaactacaagataacaatagattaacagccaatattaccgtcgccgctgcccgcttcgcggagaaacagcgaaaaacaacgaagatcgttctcgaaaaagcccaaaagctgggtataacgcaacaaaataatcatagatttgacaattgtgctcccaatcttgctttgaaattaccattataaatgaactctgaacagctgctgcataactatgtttcggattcgctactcactactctgataagttttcaagagttcaagcagcaactacagtcgtacacgagcgacgagcaacaactgcaacattggtacgaattgcttcaggccagggatgcgcgagtgacctctgagttagaagcacgaatcaagcagtttttcataacgttgcgctctagattactgcgatttctggaaagcgagcaactatcacactcccttagcctcgagacactgatcgacgcgctgtacaagattaatgacctgttgcaacagcgtttgcagattctggatgatgctattcaggaaaagacctcggaactagcagaatttgaaaatatggttcgctcaccgagtgcaggagacaatgccattcctggcctattacaaattatacaatcttatattaatctattagaggaaaactagcagcagacatcccggtcaacctgccccacaggatattcctcgccgatccattgaaaggcttcgtatgttgagtttagctgtttgttatcgttcatgcagtacccgtcaccactcgttaattttaagctcccggtgcgctgcatctctgtaaggaagaccactcgtctcacacgagaatggatcagggccatggagcacattgagcacggctcatgggtcaaatagacgtcgtaatcaagacacagataagagtttgcgtcttcgtctacaccctccctgagtctttcgcctaccgcacggatgcccaccattacactgtggtcgatgggtagcgagttttcgcagtttctgccatcttctgccaccactttgtccttctttcttgatgggtcaacaaagacgctcaccattggaaactgttttcctgccgttgccatcttcacagacaacgtcgacgcacgcgatagctcatttcgtacttcctgcatgtctattttatagtcgttcaatatttgatcattggggttgccgttccaaatcaacggccagtacttcacagaccaggcattgttcagttcctttgtgctgggcgcaaactcaggcacttcgatatcatcactcagttcatactttttcgttccaacccaaatactcttcaatttattgtttatttcaccttcgtcgcaaatatactctttcgaacacaacaccacttccaaggtggaggtctcgatgtccttgcggatccttttcaaatgtctcaatgaaacagggtcatttttctgaaaatcgtttcgaattagcctactttactagttagtttacttccatgaatacaaaagcaaaaatcatatacatactctattactttcttcgagtctcttggatctattcttatactccatacattgactgcacttatatatgtttgaaagttagttaattgatcctgatttctgttagatctcatagatacatacttagtttgggcgtatttacatctttgaaatttctaatttgcagaagccgattttctattatcccgttctgataatcgatttttagcggattattaactttcttaaccataactaacacgccctcatgaatattatccttctgaggtttgaataatatatacctttagatgagctattggtgattcgcatttaggaatgaaaaaaagtaaagcatggcaatgaatgacacaagtgaaatagaaaagtgaaaaattaaaaaaaaaaaaaaaaaaaaaaaaactgatttatactcatgaaaatcttattcgagttcattcaagacaagcttgacattgatctacagaccaacagtacttacaaagaaaatttaaaatgtggtcacttcaatggcctcgatgaaattctaactacgtgtttcgcactaccaaattcaagaaaaatagcattaccatgccttcctggtgacttaagccacaaagcagtcattgatcactgcatcatttacctgttgacgggcgaattatacaacaacgtactaacatttggctataaaatagctagaaatgaagatgtcaacaatagtcttttttgccattctgcaaatgttaacgttacgttactgaaaggcgctgcttggaaaatgttccacagtttggtcggtacatacgcattcgttgatttattgatcaattatacagtaattcaatttaatgggcagtttttcactcaaatcgtgggtaacagatgtaacgaacctcatctgccgcccaaatgggtccaacgatcatcctcatcatccgcaactgctgcgcaaatcaaacaacttacagaaccagtgacaaataaacaattcttacacaagctcaatataaattcctcttctttttttccttatagcaagatccttccttcatcatcatctatcaaaaagctaactgacttgagagaagctatttttcccacaaatttggttaaaattcctcagagactaaaggtacgaattaatttgacgctgcaaaagctattaaagagacataagcgtttgaattacgtttctattttgaatagtatttgcccaccattggaagggaccgtattggacttgtcgcatttgagtaggcaatcaccaaaggaacgagtcttgaaatttatcattgttattttacagaagttattaccccaagaaatgtttggctcaaagaaaaataaaggaaaaattatcaagaatctaaatcttttattaagtttacccttaaatggctatttaccatttgatagtttgttgaaaaagttaagattaaaggattttcggtggttgttcatttctgatatttggttcaccaagcacaattttgaaaacttgaatcaattggcgatttgtttcatttcctggctatttagacaactaattcccaaaattatacagacttttttttactgcaccgaaatatcttctacagtgacaattgtttactttagacatgatacttggaataaacttatcaccccttttatcgtagaatattttaagacgtacttagtcgaaaacaacgtatgtagaaaccataatagttacacgttgtccaatttcaatcatagcaaaatgaggattataccaaaaaaaagtaataatgagttcaggattattgccatcccatgcagaggggcagacgaagaagaattcacaatttataaggagaatcacaaaaatgctatccagcccactcaaaaaattttagaatacctaagaaacaaaaggccgactagttttactaaaatatattctccaacgcaaatagctgaccgtatcaaagaatttaagcagagacttttaaagaaatttaataatgtcttaccagagctttatttcatgaaatttgatgtcaaatcttgctatgattccataccaaggatggaatgtatgaggatactcaaggatgcgctaaaaaatgaaaatgggtttttcgttagatctcaatatttcttcaataccaatacaggtgtattgaagttatttaatgttgttaacgctagcagagtaccaaaaccttatgagctatacatagataatgtgaggacggttcatttatcaaatcaggatgttataaacgttgtagagatggaaatatttaaaacagctttgtgggttgaagataagtgctacattagagaagatggtctttttcagggctctagtttatctgctccgatcgttgatttggtgtatgacgatcttctggagttttatagcgagtttaaagccagtcctagccaggacacattaattttaaaactggctgacgatttccttataatatcaacagaccaacagcaagtgatcaatatcaaaaagcttgccatgggcggatttcaaaaatataatgcgaaagccaatagagacaaaattttagccgtaagctcccaatcagatgatgatacggttattcaattttgtgcaatgcacatatttgttaaagaattggaagtttggaaacattcaagcacaatgaataatttccatatccgttcgaaatctagtaaagggatatttcgaagtttaatagcgctgtttaacactagaatctcttataaaacaattgacacaaatttaaattcaacaaacaccgttctcatgcaaattgatcatgttgtaaagaacatttcggaatgttataaatctgcttttaaggatctatcaattaatgttacgcaaaatatgcaatttcattcgttcttacaacgcatcattgaaatgacagtcagcggttgtccaattacgaaatgtgatcctttaatcgagtatgaggtacgattcaccatattgaatggatttttggaaagcctatcttcaaacacatcaaaatttaaagataatatcattcttttgagaaaggaaattcaacacttgcaagcatatatatatatatatatacatatagttaattagtactaataatacatgaaatactgacagcttatgatgctgataaggaaaatattgccgcaaactttgtaataagccaaaagcactaatctcttttccgttagctttcataaaattagtgtatttaagtaaaccccggcccaaaatatgctctcaaatttgcttcatccttctgctttcttatcctttctacttcttcaaagcctcccgattttttcaggtttgaattacccacaaaattttccagttcatcatcaaattcattactagctttaagttttctttccatctcccacatcttctcagccttgtcaatagcttcgaccctactatcgtggtcagggtttaaagattggacggccaccataacttgctcccttacctgattaaatgtgcccggtctcataataggcaaaataggattactttttgatctcgaagggtttttttcttgttcttcacaacataacttaataagatcgaaagtttctaatgccttacccaagtcttccttcaaatctaaaatcaactcttcctgcaacgtgagaaactgttgttcttcacagaccttatcgagctcagcttcccaagtttttttccaatgtggtttttcagtatcaataaactcctgtagtttaagtacatctgcttgggcattttctaaatccttggatacggtttctagcttctttttagcgggctgagacctacgctcagcaacgtctttcctcataatttcgattacatcttgcaaatcatctactttacttagcagagtatcggataaatcaccgagttcggtctgtgatttttccatgtacattctgttggaagagtttttggcagaaaatgataaagacttaaagttatcgacctttcgtaaaatgttgaaaatagtctcattaatatttgacctattaatattatgcacttgttttattttccccaattcgtactgaatatctttgatcgttttatcatcatcttttttgttttgccccacaagatcgtgtttgttagcttcaaggccaggttgtggtaaaacttccgtttgcttgccgctaattgcagaaccaaaactcatttcttttaaatgtcttattatatcattctgactattcgatatctccatcttaactgtgtcaatgaattccttgatcgtattatttggattctcttcgagctttagctcgataacaaacccttctttaatatcgagaagatttagttcctctaattcatagaatactccatattgaggatccataatatatatgtctgggaaggaatttgctccaggagaatacgcaaagcgctcaataaataggagccttaatgcgttttttgtagtaggcagttgcacatgacacttctttgttttgtctcctatccttaaaaatactggacaagttccattcatggctttatctggcgaagttgtaacaacgcttgataatcttcgtggagatgcacgaacattctcaataggcaatggcgttttcgccaatggactcgcctttgatacatcgtcaatgcttttacccttattttcagctgaattaatgtttctatcatcatcattgttgttatttccgtataactttgactttcttacggtttcctctagatgcaacatcgagggtgaaggagttgtcatgaggccggcagccgcagcagcttctgttgtagactgatttgtcaatttagccatatggtaggcagagtatctctttgaggctctcctttgtaaattagttcccttcttcaattgtgaaagtgcatcatcatcatcagatgcgtttggagcattgttagatttaaggttttgtttaatattagttcttggttttgtcaatgttgcctctgctgactgagcagagggtgttcccgtagaagtagaattcactttttccccatagctgttttcgactgaatcgctttgcctctgatcacgtacaatactgctttttctgctacttaatggagtcccctcacgggtcccttcactacccaatgaaaggttactagtaaaggaagggttttgttgatgatgtgattttacacttatccgatgctcttgctgcatattcttcaaaattgcttgtttaacctttagtttgtctaaaagtgtcactataatctctctgatttttggcagatgtttatttaaagtttcatcagatggtggttccctcaatgtcacttccaatacacgtcttaaagccattggcacatcaccaacatctgacatgtcaactttcgcatgcatgaagaatttcgatacgactttgaagtcattgcccaactgaacgtatgcatcagatactaatcttccagaggttgtccccttagaccattgtgttaagacctggaggaggtgcttggtggacatcagcaactttgttactgtcgtttcaatactactactgctagaagcagttcttttaatctttggggtgccatacgtagggtcatccacggccatcttcatctaattttaaaataatacgaggattactacaccaatttggcagccagcttctactctttttcccttttcttgggtttgttttgatgccattatctcaagaatgcataatagtaggataaaattcgttcagctcggctagcgagatatcttcaaagagtaaagcgcatctgcgtgtaaaattaaattcaagaagtgaaagaataaaagataggattgtagatttgaagtttagtggtagcgtcagcagataagcttatggatgttgatgaaccgaatcctattgtgatatcagattctgaggccactgatgaggaaattagtatcatatacgaacccgaattcaatgaaaattatttatgggcagaggaaaacgtccaagaagcaagcagatcacagaaaattgtcactgagaggttgagcctggattccactgctggagaatcttgtactccttccgtagtaactgatacacaagttactacggggcttcggtggtctttgaggaagaggaaggctattcaaaagatgccatacagtttagaacgcataaagcataggcagttgctagagggctatgatatctctagttttgacagcatttcgaatcagttgaccttaccgaagaacgcttctacagtgattcactcaaatgatattttacttacaaagagaactggtaaacccttagatgagcagaaagatgttacaatcgactccattaaacccgaaaacagctcggttcaatctcaaagatatgatagtgatgaagaaataccaaagaaaaggcatcgtacttttaaagacctcgaccaggatatagtatttcaatcaggtgattctacggaagatgaacaagacttggctagtacaaatttacagaatactcaaaatgacgaagtaatatttagaggaagagtattgaatgtaagaactggttaccgtggggtcctgccaagagttgcttgggaaaagtcgttgcaaaagcagcagtcttcaaaagtcacgaaaagaaaaactcaattattgaaccataagggtgtggctaagaggaaaatgaacagaagcgcccatattgaagatgaagaacagaacttattgaacgatcttattgcacctgatgacgaactggatatcgaggaaaacgcccctccagatatatacttaggaaatcttccagaggatcgtgaggctaacgaaaaggaattaaaggaattgcaagaatattatgagagcaagtatagtgaagacgcacaatcggctggaacttctggttttaatttaaatgaggaataccgcaatgaaccagtgtatgagctggaatatgacggaccggggagctgcatatcacatgtgtcttataaagaccagcctattatttatttgaattcacggcattcagatagcggatttagtgagcaatacaatatatctgccgaagataatcaaagtgtaatttccctagatgctgctgaagagcataacgatggtataattgacaagatgttggttaaacctaaaagaattaaagcaaccaatgatgccaactttttgaatacaaaaagtaagagagtgagaagatataagtacaaatatcgaaattcttgtctggccccaagtacaaaagctatcaaagtcggaaaacggtcagcgcataaatctcatttggcagctaataatccagtttcatttgtttctaagaagaatcatgtaattgatgattatttttttgaagaattagaatctcaatccctagaacaggatgacagctcttctctcaagccacagaaaaaaagaaggaagaagaaagcacctatatactcaagtttctccgctgatcttgaatcgagacgaaaaccagttttcaatactgttgtagaggttcccacgaaccgatacgctttcacaaagccaaatgtacgtaatagggacagcattaatcatgacatggaatttgaggaagaagactccaatcaagagcttggaccaataatggtcgtacttgactcaattttactaaaaaaaccttttgagccacctaatttcttcaagatccagttgtcagacaagagtttcttgctatcaaaattgaatcctgcagatatagctacatcattacagaaaatattcagagtaatcattgataaaggtatcactgatactgaactagttcactttaacgaaagccttattgcttttttggtgcaccttgacatgcctgaactattcgacttaataggtgaatttcatcgtgaatttagatcgaaggtcaatagcttgaggaaaaaagctaaaccaatccatttttttcaaattgcggcatgccaattaatgtttctagaaatatcaagatataacaaaatttcagccgctgcaaaattcgacatggatgtcaaactcttagatcatattgtgtctttcttcaaattactttctgtctgttatgattctgttatgaaaaatccaatgcaatatctgtacacaagttattatattctctctgctgtcgttgatgtcatacataaaaaggaagctttgtgggatttatttcaaaagcaccccttttcgcctcatatttcactgttgctggtcaacatatttcctacgaaagtctgccgctggcaggttttgagattagattctgaattccaacccttgagttcggcatttcggttcatcaattattgcattgagacttgtaattggaatgttacaaattctttgattctttctctcgatcgcatattcaaacggagaagattttcggactttgaagaagagtctgatttgtcacaaaacaataagataatttatcctccaacgaatcagcttacgagtcgattaatgtttaacagatatttgcatctactgacgttgtgtgaattgtctagttctgatacacaacgtgtgataccgatgggtgatatttctatgaatgattctctatctgttttgaagaaccgcctcaacctactaattgttctagctacacgttttgatttaaacttagagaagcgcttccaagagctaacacgaccgttatatagtaaggaatatttaaacttgcatacacagaacacagtcaggacgataacaacattgatcatgcaggccagcctttcattcctggaaatcagtcgaatcaaaaatcatccattcagtggaaaatttattgcgtcattatttgataaactagtacttcaacaaccttccatatcgggagtaacagaaaattttttgaaagaattcacaaatttagtctccaaaatgaaaagaaaaagcgtgagtatgctcaaatttctgtatccttcactggtggccatgtctcaagaaaatatattcgagtcgtctttttttttattattacaggtatatttgaagagcttagatgtgctgggtccaacttgggtgcaaaattatctttttcagtttataaagagcaaggctcaagaaaatgaaagatggatagaatgctattgtcagatcggaaaattcctcgtagattctggtatatttacctggtggactttctttacctataacggcttagatgctgcattacactttcagcttgcatttcactcccttattatcgatttctgtgatacagactcttttgaattactgaaaaaaccgctttattccattgcttctgatttgctgctcatttccaaagatgacgctttctatcactttctttccaatctgttgaagagggcacatatcatagtagcagatttgaaacctgtttccgatgagaatgaactcctgcgattggcttatattttttctaaagcattgaaaaaaaatgcatatcaagatctattagctgttttcttatccctggcgaaaaaacattacgatgaaggggacatcagtagaaatttcttggcaaaatatctcgaatttcttaacaaaaattgcttgactgagctaagaaataatcaactcttcatcagtctaagaagggaacttggtatttcaagtgatgaagacgaaaaatgtgcgttctgggactcattcaatgaagcaggtgatatactttccaaagctgcatttgttgaaaccggtattgttcaagcctgttgcactgggaatgaaattgatggatatcttgacaatttaagcactttattcacctccaccatgttagagagcccttttgcatttttttctgacctggtgatagcacacatatttgagaacagaccttttttcgacgtgaatatcaagaattttcttctatctcacttcatagaccttttcaacaaggttttaaaaatgaaattcgagcaggtatctcctgatgaatttgctgaactttgcaaagtatacagggcgttatgtattgagtgcgcaacagacgacacctttaatagtaatagtgatttgatcgccgcaaaagatgcgtttttggtatctgtgttgagaatcgcagatgggttttgggagcatgacaaacttttgcagctaaggatgcttgatagtaatatgaacatacctaatcagattcctcatactactttgcaaagttcgctatctgcgattgtaataaagataatagaaagtaatataggaaaaattgaggcgtctgaacctttcaaaaccttcaagaatacgtaaattatacacatgtaatataagcatatttaaaaattctccgtaatatatgtcatatatgtcaaattgcgaattagtccaaatagaaacaagatctatcagtgttggtgataaacattttgtattcttttggtaacgtgtatctcaaagaagtgcatgactttttttacgttctctttagtcttgatttagttgcttctgcgtttgttaaattttttgtccttcccgtttgattaataatacttataataatacaattctgtaacaagaaaagcaaagttactacattctcattgtggtttctaagtcatctaatcttctcctgccccttctagataatctatcagtttctcttttcaatcttcttaagtttctttctttttcaatttctctcttttgtatttcttcttttgttaatatttccacccttgggcaccaattggagcccagttcatcaatatccagccttataccagataagtacccaaatgcggcatcgtttgggacatggtcctgaatcaagtggccatctacccagtccttctttatcttcaagatagtttcatgaagcgattgagatattaaggggatgaactctcttgttaagccaaggtcctgtacaatggatgtagcaaatctttctggagtaagtgatttgtcgttcaagttccactggaagttatcttcaaaaaatctgtcttgtaagttgcaggttaggttgattatcacgtggaggtcagacattatctcagtggctgcaatattttcgaggtctttcaactgctcttttattatattcgcaatttgagtttgtaaggtagcggaagtcatatcaagatctttacagtatatagaggcaaattcctccggagatatggagtcgtcattgtagttccagagaaactggtcttttatggtatgacccatatgttctatatccaaagtaattggtatcatgattgcctctccagaattggcgtttgccttcgtttcttgatcagtgttgagtctatatggagacaccacttttccgttaatgaaagtatctcttattttagggtatctcaatatgttgaaggggttgtggtgttggtcttgcagatccggtagaacggcgtttccaatatcctgtgcctgcgctttgttgctcggaccattgctggcgttgttattgctattcaaaccggataaagattccacaaccatgtttgaacccgcatcgtatttgttgttagagataatactatcagctccattcatgttctctaggacattgtattcggaaccgtccatggtaacaccatttgtaagtgccggagtattttcatgagacactgcattatctttatagtgtgtatcagcattgttgaaattagaaccgttcatattgaattcatcaaagagatcgttgtcatattccgcatagttgaccactttagcccttttatgctgccttgtttgttgagccattgtaaagatggggataccatcatcttcgtttgtcaatctgttatgaaagttagaaatataagcttgtggaataagctggttttggtgcgacattgtgtgctgctatgtgcctttcttctttcttttttcaatgtacttcattcaataatctctatttgtcgtattttctaagttttttttttttgtcaaagtagtcgcggcgactttaaatgagcagatcatcatttagtagacaaaaagacacgggacatcttctatctatatagtttacatactttattatgtgaaagagtctttcgaaattgcaacaatgctcgataaatctatgggtcatgtgctctataattcctgtacattagcatcgggtgcgtgtaatttttggggtgatatggcattctccatcaacttttccttttatttagcatcttctgtaagtcagatgctacttttgcactgccgtgggtctccttgtggcatataaagcatttggtgccctttttcatatctttggcaaaacacgatccacaaaaataatggccacagtttgtgaccactggagacttgtaatcttccttacaaagagtgcacttgaacggtatcttttccaagtctagagtaaccgctttggagtcctctttatccgcattccattcttggttcagcttccagccagtcttgaaatcatccctcgagtgtaagaacttgcagctatctccgtaaccacagtatcccgtctgtttgtaatctttgcaaacgtcgggctgaaaatccatcagcaccgtggtccggatattcgttggttggttaatctgtttagtgaggcgtttatttttaccgctcatgttcagtaccagctcattgtcatcactaggtcgcctcttctttgccttctcagccagctcttttctctcaaagtttagaagatcttctttagtgctgtcgtcgttgaccgttaaagtgtatttatctaaatcctcaccctttttctgtagtttaccttcattctcatgtgaaagttgaagtgtcctgctatttccactcttggctaagctcatgaggtcactggaacccttttcttcatcgctggccactagtttctcttcgctaaaattaattttctgcctctttttctggttcttttcatcagaagagcttttgttcactaatctctttctgaacatgaatacctggagctttgattaagtgatggagctttcgatggctttagcttgagtccacttcagatagagatgcgcatggctttttcttattattctccggttgcacggaaagaagcgggaagaggactaaagggtttttggatcagcttcacaaaatatatacttggatacgttcgctactgaggtaaagtgggcatgcaaggttgcaatttaggattcgagctgtctagttgatcctccggagtgtaaaaactgattttcaatgagtggtaacacaactaacgtgcatgagactagagccaagtttgcagagacgctgcaaccgaggattggtggcaatactacaaaagtgatacgagctgctttggaaaagaacgaagctgaaagcggggtgtctgaggataatgataacgggtcattggagaaagttaacgtagctacttcgccgcttttgacatcaacaccgcccacaatctcaaaggcgttggtgaaattgtacccttatttaattctcattgacgaattcctaaacgttgttacatggacaggaaagaatatttggagcagtgttttgatgctgtgtctctttattactaccgttgagtattttgaaacgctggtgaagtactttggacatcttgccatcattgctattttgtggggttattccctattggacaattatattgagggtacgttgagctcctcaccaacattagaagatattgctctcttaatgaacagagtatccttgaagtcagatattttgctctcccccatggttaaccttggaacgcaagatattcaacggcttctatatactacggtcatattatctccaatatacgtgatgataacctggctacttttaccaccgagaagcttgatgctgatggtgggcatgttccttttaacgtatcactcaccatggtctaaagtagcaagaaggcttttatggaagtttaagattgtcaggctgcttgttttctacgtcacgggtttagaccttggtggaataaataaggaccagggtatttttgctacagtgcagaagcaagtgaaaaagttggcatcaacagaaaacagtaatggcgtattatccgattccaagcctatccgttttacttatgttttgtacgagaaccagcgtcgttggttaggtattggatggaagcctagtatgttgagttatgagaggactccatggaccgatgaatttttgaatgaggctccctctcctgaaaacttccatctacctgaagagactaacactatggtttggagatgggtcgacaagacatggaggctagacatgactaatgacggtgccattcaagtgcccaattcaaaggcaagaacttccgcagatccctcccctgacgagggatttatatattacgacaatacctggaaaaaaccaagtaaagaagattccttttctaaatatacaagaagaagaagatgggtaagaaccgcagaattggtcaaaacttctgactttgatgaaagcgtgataaattcgaatagaaattctgccattgaacaaaaggttgaagaaaacagcacgaatggtttaaccgctgagcaagagcttgggagcaacaagcaagagaaagataatgcgaaaaaagtaggagagcctacaacagaagagacaaaagaatttgccgaagcatcaaacatcaacgaaggcgagtttgaaagaatttcctcgaccgatgaagaagttttaaaatctagggcaagagatcgactggcaaaagtattagatgatactgaagagaaagagcaatcaaatccaaccattggtcgcgatagcaagaaggccgtatgatgctcgctcccgtttttacctttacataatataatctctaatttactttattacacaaatggtaactccctttaaataaacttaaaaaagaacgtatagaactctcttcttcaatgaatagtaatccaattttttttattaactatacaacgttatgactttaaaaattaaaaaatatgtttatgagtagtaagaaaaacaaaaggaaacaaaaacaaaaaaagttataaagcctatttctacttcctgtataacgaacacaaatggatattattctttatgcggatgggaaagtattcttagttttttttgttccagtctcgttatgataacactccgatcattccttatttttcttataatctgttaaccttcaaagttggtggcaaagattggatcaatttcttagccttaccagcatcgttgataaccaaagtgtacaaagaagaagagcctctaaccttgaacttggtttgtctgaatggcttaccggccttgttcaattttttgttaatcttaacagtggcggtcttaacgtcagctcttctggtcaattccaaaaattgtttgatgtcggtgatttctctagccatttttccttgatattttgtcgtactatattcaacctgaaataaaaaactaacagttgaaatatttctacattgaaattagaaaatttaattctttagattgaagattcaatattgtgcaaaagcgtacagcagcaatcacgactctacatgccatagagcttggaaaactctccataattttccactcgaacgtatgatgctccgtctatttttttcaacagttgcacggacgagtcctccttttcgcaaggcattttaattgtgtgggtttatgaaaatgcacggatgcattttctctagatgaaaattccgtcttggaataatatcggaatgagctaaaagaacaccagtacgcgaatatgtgagatgccctgttttgtcacataacagcggcagttaatttggcgtcttttctgggaagcgagtttatttggcaaggctatgatgttttataatactaatcacgcattgcaacttcacaaagtagttgtgacatgtggatgtaatagcgttacttttctttttgtttattgctatttgtttctattttctttttttaaatcgcgctaatacgtggaaaaatgcgtagaagccgggaatgggacgtgattatgagatcataacatgactgcgagctagagagcattggaagaatttgcttttttgttcagttccctactcatatatttgtttcatagaagtcgtagtatacgtgagacaagagcacttgaaaataaatcttggatctgctgggagcaatatcatcaagtaaaataagggggaaaccatatcaaatgtcagggttcattaagagcacgttgcttggtctaggccaagattacttagaagatcaatatcaagagttcgcagaacagcatttccagccaaccagggatccgttttatgaaacgaataaagatggtaaaaagcaccgccgcagactgccatattattgcactaaggatgaaagtaaagcgtggaaaaaggtccaaaacaaagcctggctgcatgacaaatcactgtgcggatgctgttgctggacaaacactataggatgggcaccattacttgcacttctaccggttataggacccttattgatgtattgggtgcatgataagttgattgaattggcagatgacaggtataaattgcctgcggaaatcaaggtgaagatgcatggtaatatcgttatcgatttacttattagtttagttcctattctgggaagtgtttttgcatggttgcacgcatgttccacgagaaacgcagctatagtttacaattttgttggaaaaagggcattggaaagaaagcaagcggagctcatgcatcaaaaagaagaaaatgagaaacattccaatgccaatactgcacctccagtagttggtggcaacaaaaatgtgaatggaaacagaaataatagtaaaatgtataacagaccgcctgtgacagctccacctgcaccagcatacacgcgcagtactaacggtcgcccccaaagaggttacaggtgaacaaaccggccacggtaaggctacattcttatcaacaaatatgggcaatcaaaaacttataatgtaaattttattttttatcgtaaacatgtatttaagaagtaatataaaggatgtttgacatgatcattttatatatgcatacacgttattgaagttatatggtcgttaaatcattaaaaggcccgtttctttgaaatatgctaacggaatcaaaccggtcgggtcggttagatgtggtattgttgcaaatcagaaagccttctttcattgttttgggagttagagccccttctggtcttgttgaagactgtcttaatttcgccagaatcgattaagtcattaatctcatcgccaggcttgccccaattgcctttcccatagcctcctctcttgacgtggttgggagactccccaaagttgccgttatgggtgaaatactttgggttagactttgcttcgtggactgtccatttgctagttctggtcatgtttgaattgtgtttgtgttagaaatttgtgtgctttaatgttatgttataatgaaatcttattagatttatttaacgtttttgctgtgcttataataaacattacataataaaaggagtagaagaaagtggtagagaggagtacaaatctacctgccagaactctctccttatatatatttccagtggtgtctggattacctacctcaagccataccatatccataccatatccataaacgcctacaaaatttctaccccaatccagcagcttctatcactatctcgtataccaccataggcaccaccactgtttgtgtaaatttactcctgaggggggggtggctcaacacggtgtaggccttcttcccgcacaatccgatgaaaccccacaatcgcctccgtctcttccactgtgcacggcgctagctcaacatcttccccgccacatttactgtggcaaagaaggtgcataatctaaaaaaacatacgtatgagaatggaaagggcaagataatatcggaccgtagtgagtcacttgcttttggtattgcaaccaactgccgcccctcttcccgctcttgcaccaaaacgctaaatgcccattgtgatggctcatccaccctcacgacgaagtaagacccggggcacaagaaaatacgagatcataacagttcgagtccgtttattgtgtgcggttttggtacgctttttcgtgaggtgtactaccattcatgagagtcgttttaggagctgtcatgaaagatatgtatcttgttgatgaactgtaaaaatttgcagaaattgcgctattccgtttatttcattgtcgattcggtgttaatattaggggtacaaaatatactagaagttctccctcgaggatataggaatgcgcaaatgggcatttgatgtgacacaaaatttggacaatataacgattcatttttagatcgttgttcaaccgtcccagtggccgagtggttaaggcgatgcctgctatttcctcagaaaagcaattaggcattgggttttacctgcgcaggttcgaatcctgtctgtgacgctttttttaatttctttactccatgacaaaagcggataaaaattcccgcattcggcgtaaaaaaatccggttttttttttagcactcgctgtttttgcctctaccgggtgaaaaatgacgatgaagacggctggaattgcgctgcatccgcttacgtaggatagaacacctacaaagatttacgaactttattgctcgaagattcgctatccatatctttttagtttccccccatttcacaatgggataccgttgttttttctgtaggtacgctttctcatagttaatagagtcagtaattcatttcattttttgcagaaaggaatttcttcacctaatttagaatttcatcaacatttattgtatctgcatggtataacaaattagaaaaatttggaagggaaaaaaaaactgttgcgtcaattacttataccagggatagaaaaaaaaaaaggaaacatggatcccacaagagctccggatttcaaaccgccatctgcagacgaggaattgattcctccacccgacccggaatctaaaattcccaaatctattccaattattccatacgtcttagccgatgcgaattcctctatagatgcaccttttaatattaagaggaagaaaaagcatcctaagcatcatcatcaccatcatcacagtcgtaaagaaggcaatgataaaaaacatcagcatattccattgaaccaagacgactttcaaccactttccgcagaagtgtcttccgaagatgatgacgcggattttagatccaaggagagatacggttcagattcaaccacagaatcagaaactagaggtgttcagaaatatcagattgctgatttagaagaagttccacatggaatcgttcgtcaagcaagaaccttggaagactacgaattcccctcacacagattatcgaaaaaattactggatccaaataaactgccgttagtaatagtagcatgtgggtctttttcaccaatcacctacttgcatctaagaatgtttgaaatggctttagatgcaatctctgaacaaacaaggtttgaagtcataggtggatattactcccctgttagtgataactatcaaaagcaaggcttggccccatcctaccatagagtacgtatgtgtgaattggcctgcgaaagaacctcatcttggttgatggtggatgcatgggagtcattgcaaccttcatacacaagaactgccaaggtcttggatcatttcaatcacgaaatcaatattaagagaggtggtgtagctactgttactggagaaaaaattggtgtgaaaataatgttgctggctggtggtgacctaatagagtcaatgggtgaaccaaacgtttgggcggacgccgatttacatcacattctcggtaattacggttgtttgattgtcgaacgtactggttctgatgtaaggtcttttttgttatcccatgatattatgtatgaacatagaaggaatattcttatcatcaagcaactcatctataatgatatttcttccacgaaagttcgtctatttatcagacgcgccatgtctgtacaatatttgttacctaattcggtcatcaggtatatccaagaacatagactatatgtggaccaaaccgaacctgttaagcaagttcttggaaacaaagaatgatttgccgtccggaattgcttcgttctttctttcatctttctctttacaatttccaattttcccctacaggaattaattggagggtacaagcgagtagaaatgtgacatatgacttacctatctgtgttttagtatagtttttttttctgtagtataattcacttttacactaattttttcgcctttttctcttaaagagctaatttctataaccttcagcggttataccaaatataaaaaatggaaggaaaacaaacagtaagaaataagcgcaacagcacgttagttcaccattggattccaacatttcaaaatttaatctaatggcaagagatatcacatttttgaccgtatttttagaaagttgtggcgctgtaaataatgatgaggcaggaaaattgttatctgcttggacttcaaccgtacgcattgagggaccggaatcaaccgactctaattcattatatattccactgctaccacctggaatgttgaaagtatgtttctcctagcaaaattaaaacccatccgtgaatgaagcgttactaactataataactggtagctttgtcactcgtaccaggaaaagtgaagattaaactgaattttaaaatgaacgatcgattagttacggaagagcaagagttgtttacaaaattgcgcgagattgtaggttcaagtattcgcttttgggaggaacaactgttttatcaagttcaagatgtaagcaccatagaaaaccacgtcattctcagtttaaaatgtacaattttaacggatgctcagataagtacgttcataagcaaacccagagagcttcatacgcatgccaaaggatatcctgaaatctattacctttccgagttatcaacaactgtcaattttttttctaaagagggaaactatgtcgaaataagccaggttattcctcattttaatgaatatttttcctctttaatagtgtctcaattggaatttgaatacccgatggtcttctccatgatttcaaggctccgattgaagtggcaacaaagttcgctcgctccgatatcctacgccctaacgagcaattcagtacttcttccaataatgcttaacatgattgcccaagacaaatcttcaacaaccgcgtatcaaattctgtgtcgaagaagaggtcctccaattcagaattttcaaattttttccttaccggctgtaacgtacaataagtagcatgcataaaatataatttaatcaaatacttttgggcaattaaaattttagttaacaatagttatgcaatgcgctttatgttcatatgataccgtttataagctattgccatatccttatcttattgcttccagtagcctcgagtcgaccactaaaaagatgtcacttaagacggaaattatgtagctgcacttcttttttaacaagttcggtcggcccttcaagttctcctttctaaagcctcattatttattgcgtagatgctaaatgttatcgcggtttagcttgcatgttacgtttccgttttagaacctggtcgagtagcgaataatgtcttcagttgatgtactgttaacagtaggtaagttggatgcctcattggcgttactgactactcaggatcatcatgttattgagtttcctacagtattattaccagaaaatgttaaagctggatctatcataaaaatgcaagtttcacaaaatttagaggaggaaaaaaaacaaaggaatcattttaagagtatacaagccaaaattttggagaagtatggtacccataaaccggagagcccagttttgaaaattgttaacgttacgcaaacgagctgtgttctagcatgggatccattgaaacttggctcagcaaaattgaaatcactgatcctttataggaagggaatacgttcaatggtaattccaaatccattcaaagtgactaccacgaaaatatccggtctttccgttgatacgccatacgaatttcaattgaaactgataaccacgtcaggaacattatggtctgaaaaggttatattgcgtacacataagatgactgacatgtctggtatcactgtatgtttgggtccattggatccattgaaagaaatttcagacttacagatatcccaatgtttgtctcacatcggggcgagacctttacaacgtcatgttgcgatagatactacgcattttgtctgtaacgatctagacaatgaagaaagcaatgaagagcttataagggcaaaacataacaacataccaattgtcagaccggaatgggtgagagcttgtgaggttgagaaaagaatcgttggtgttagaggattttacttagatgcagatcaaagtatactgaaaaactacacattcccaccagttaatgaggaagaactttcgtactcaaaggagaatgagccggtagccgaagtagcggatgaaaataagatgcccgaggacacaacagatgtcgaacaggttgcatcacctaatgacaatgagagtaatccttcagaagctaaggaacaaggagaaaagagtggacatgaaactgccccagtaagtcctgtagaagatccattgcatgcttcgacggctttggagaatgaaaccaccatcgaaaccgtcaacccctccgtaagaagtttgaaaagcgaacctgttggtactcccaatatagaggaaaacaaagcggactcttccgcagaagccgtggtagaagaaccgaatgaagctgtggctgaaagttctccaaatgaagaagcaacgggacagaaaagtgaggataccgatacacattctaacgaacaagctgataatggatttgtacagactgaagaagtagctgaaaacaacataaccacagaaagtgcaggggaaaataacgaacctgcagatgatgcagcaatggaatttggacgtccagaagctgaaattgaaactccagaagtaaatgagtctatagaagatgccaatgaacctgcggaggattccaatgaacctgtggaggattccaacaaacctgtgaaggattccaacaaacctgtggaggattccaacaaacctgtggaggattccaacaaacctgtggaggattccaacaaacctgtggaggatgccaatgaacctgtggaagataccagtgaacctgtggaggatgccggtgaacccgtacaagaaaccaacgagtttactaccgacattgcctctccaagacatcaagaagaagatatagaacttgaagccgaacctaaagatgctaccgaaagtgttgcagtcgagccatccaatgaagatgtaaaaccagaagaaaaaggttcagaggcagaagacgatatcaacaacgtttccaaggaggctgcctctggtgagagtactacccaccaaaaaactgaggcctctgcttctcttgaaagcagtgccgtcacggaagaacaagagacaacggaagccgaagtaaatacagatgacgttttgtccactaaagaagctaaaaaaaatactggcaacagcaacagtaataagaagaagaataagaagaataagaagaaagggaaaaagaaatgattaatggatgccttcaatgagttccacgacgcacgtttattttttcgactgagaatccctcagcaaatataatctattttttatatatctgtgtatatgtaagcatgtataactagttacaaatatgataactgctttggcgatcacttcattttcttgagaggggtactcagtagccgccaagcacgaaatgtccgttattaaaaattggggagtgaatcttaaaagcccgaaaaggaaattcaaaatctgtctatttataggccgtcgcgctctacgaaaacgcgaaattattcaaacggaaaacggaaaaaaatctaaaaaaagaaattaattgagagatctcacggaaatgccgcgaggaatgtttctcgaggctgagcggcgtggtctgtgcaaaaaaatggcaatttttttgtaggagtttgcattgggccattcagaaggagcaccgttagatgggatggtaaatgaatttgctgtttcagatttgaatcaatctttacccgttatttttgccgttttgctttcataatctgcaaattaacaaagtcataaagaacataaagacatcaccccagtttttacactcttttttcctgtgtttggtttagcacaactttccaataaccaagttggtttcagatcatccccatattattttctagtttcatttacttaccaaactcaccattcaaggctttcaaattaagttacgagtacagtggaccatttttttctgattcttcatattttccgttataagtcttataaggaaggtatacatttatattgcgaatttgaaaaataatttaaagctgactttgcgttttaggtaggctagaaaagaatacaactatccctaaacacattctagattcacgaagacgcctctgcctcaaagacatactatatttttactctcgttgaacaaatagtaccattatttcgctactttcgttgaagattggacatataaaatacgcaaatcatagtatgttgtctttcacaaccaagaatagtttccgcttattacttttaatactgtcatgcatatcgacgatacgcgcacaatttttcgtgcaatcatcatcttcgaattcttcagcagtatctactgcacgttcttccgtaagtagagttagttcttcaagttccattttgtcatccagtatggtttcttcctcaagtgctgactcatcttcccttacttcatcgacatcaagtaggtccctcgtgtcacatacgagttcgtctaccagcattgcctccatatcgttcacatcattcagtttctcatcagattcaagcaccagcagctcttcctctgcttcttcagattcttcatcctcctcatccttttccatctcttcgacatccgcaacttctgaatcatcgacgtcttctacgcaaacgtcaacatcatcttcatcctcactgtcgtcaacgccgtcctcttcatcatccccatcaacaatcacttctgcaccttcaacctcctccacaccatccactactgcctataatcaaggaagcactatcaccagtattattaacggtaagacgattctctcaaatcattatactaccgttacgtacacaccatcagcaaccgctgattcaagcaataaatccaaaagttcgggtctttctaaaaaaaatagaaacatcgtcattggttgtgtggttggtattggtgtaccactgattctggtgatactggctttaatttacatgttttgtatccaatcatcaaggacggactttattgactcagatggtaaggtcgttacggcatatagagctaacaaatttacgaaatggtggtatatgcttttgggtaagaaagttagtgatgaataccactccgattcaccattaggtggtagtgcatcgtccgcaggtggtttagacctagatgaagcagatgatgtgatggagcaaagctcccttttcgacgtcagaataagagatagcgatagcgtattaccaaacgccaacaccgccgaccataataataccaatagcggtggagagcctataaatagtagcgttgcgtcaaatgacataatagaagaaaaattctatgatgaacaaggtaacgaattatcaccacgaaattattaatcatatccattcatatcatttagtgcttatggctacttttcattcctcaattattgtaaattgaccatcttaattatatttctgatattgagtaggtggacttcattagtatttttacaaatattatcaccttcttatgtaggattagcattacataccctctaattaaaaaaagttaacattaattacattttaaaaaaaattgtaatagtatgatagtaggacctgacagccatttgaataaggtttcgagtgctttaacgttccactgattttatgtagttcatatgggggttagtctggtttgaggaggagaatttcagggaagcagtggccgttgaatctccctgtagggcgctgattatttttatcctaataatccaaaaatgacaatgtcaataaagaaaacttaccgagttctgtgaatttctccctaaaaaattactaattatacctgggcgagttttgaactctttggcaaataaacttggggtaaacctttcgattataaagacgttactgctcaaaaatgtgtagaagcataaggagatattctctcgtatgtttaattggagttggcttttttggactctgaagtttgagtatgggaggggaagtaatcgagattagattccctgatgttcacatatggggataaagaatgctttttgggatatgattgtttctttccgtcgttacggttgtaggtgcaacgaattgcgtaagggtggctagccgagatttaatgacgacgcaaaagggaataactgtgacaggaagatgaattcacaaagtttataaaaagaaagggcgatgcactgctacatggttgaacaaggcactacataattcacagcttgtagcttgtaaataaaaagagcattcacgcgatatacgattttcaatgatcactctaagaggaacggcgaaaaatagaattcaatatgaactggaatggcaattatgatcagttaaatatacaatattgttgttgcaattgtattacatttaaataagagcatgtatgtgataaattactgggaatttatggtataggttccaaaacgccaccgcccaaaacattgttattaatgaaataagaatcaacgatcttctcaatcatttttatttaatgggtattgaaatgaaaggattgataatgtaataggaagatgattgacccagaaattatctcaaaattcgcctatttctcagttatattaacctgcttattttaactttaaaaaaaattggaaagtttgcattctacgttttagcttttccgtataaaaattagataatttgacgttcagtataaaaaacgtatcgtaataggtttgcttattggaacgttaaggaaaaaaataataaagaattcatttttttcctttttaacccacctctttcaatccacctatacaactcattattagtagagtattattctaccgttttatacagatcatatcgtgtcttttgctatgctaggttgaaacaaggtaagatacgttaaacgacaacggctatgttgcaggcgaatcgctagcgattatttaaaagatcgtaaactataactgagaaaataaagagacgtaatccaaagtactagcaacactcaacatatataattgtcaatactttaggaagctactatttaagatcaggtacgtagaagcagacgaacagattcgagtttcgatctcctttctgtattgtattggttaggttacatctcggtggaaggctgtcgtatctcagaatgagatacgtcagtatgacaatacatcatcctaaaagttcataaaacacacatgaaacaaccttataagaaaacgaacagagtgagtaacatgagataaaactccgccttccttggctgacccacccaaacatataaatgcctgaacaattaatttggatccgaggttccgcgcttccaccatttagtatgaatcatatttatgtagtatataggataagtaacatttcgtaaatcaagctgataatccattttgacaactggtcacttcctcaagactgcttatattaggattgtcaaaccaccttactatgaattgcgttttgacacaggaaacgctaatgtaatataatccgtgatagtttaatggtcagaatgggcgcttgtcgcgtgccagatcggggttcaattccccgtcgcggagatttttcatttttttttttttgagccacaagaggtatagttcgacagaagagttctattaaagttttcctgttatttcatttggaatataacccaagttgcttttctttgatcataattatttccacctctttaatggtttgtttattggttgattatttcagcctttcttttaggttccttcgcattacattaaaccccgtaactaaacttaaactttaaaaaaaaaatatggacaacttcaggagatagatacaataaagcatctttaaaatttgagcaatgctttgcttattaaccagcaaatgaagactatgaattctaattgctaaacatgttaatgatgctagaaagcaagacaatgttaataaataatacaattcatgcatttagtaagatgtaactgtccaacaaactggtggtacaaggatccttcactgcaattagagtagcgtacgaatgcaagaaaattaataattacaaggaatgttgaacaaaatcagatttgagctttggtaaaattggttatcttcctattattttggttcagaagcagaactgaatagtaaattttatcatcattgtagacaacattccacacttgatttaggtataactttatataatatcactttgaccgatcactaattttcttcaatattgataaacaatggaaataatgaaaatccaggtaatataatgggttaaaatcagatggtgatgcatgatgtaatccatggcacatattccaaaggaatcatcgccggataaaaaaaagacgattgtggtgtctattcatcaaataaaaagttccaaacatataccatttatcaatactatattatgaactcataataatgagaagaaaattattgaaccggatattttaatcagtgtcaaattcgtagcactttttgatgtagtctaagttggaaaataaagaggccagatcataaacgaagaattcctaattcacaatatgtcctgcatatacttcctcagaaaaatatttaaatcattttttataatcacgcttaacctcgatatctcccaaactaaaatcggtatcaaaggtgctcgtaaaggaccatcaaaaaatacctaaataacatcgacgataattggcaatgcttcctagcatacaaaagacaattatcacaacactttttaggcgtggctgaaaatagcagctatttctgccacttcaaaatttgtttggctggcattgttcttagcaaaaaaaaggatagcttttcatccaactcaattaagaaagttagaagatccttatatatgatgaagaaaaattttcttcggatgttggaagagaatgttcgataataatcgttacatacgattgtcactgtagcatttgttagggttcaatcatatatgataagcccaatttgagaccaaaatcgtacattggacaggaccgcatcacgtcagaatagtttttgtgcatctatgtaatataatacggttgaattatccttttataatgatgactatttaattattatatgattaaacaaaaaaaagaagaagacaaacaacttattaccttatttcttgattttatatttattcggaagcagcagctctggtatagatagcttgcttggaatgcttcgagattggcttgatgataccttccttttccaagtgcctcaaagcaattctggcaagagaaccaccaatctttaatctatcaaccaaaacggaaacagagacgtatctgtaagttggaacctccttcaagattctgtcgtatttttcttgatccaaaataacagcgtgttgagctctgtccttcatggactttttggaccacttcttcttggacttcttaccaccagcaagagcggcagcggctttggcagctttagacaattgttgctttggaggcatgttatattatgttctgagacgtaagaaagggtgaaaattgatgttagtgtcaaaaattatattacaaaatacgcagagatattctagttcctttgatgaatgaatctttcagaaaaaaaagtcaaagcaaaagcaaaatggcctgcagactaaactgtatggtggtcttggaatgataaagatctgtttaatagatttagtagatacaatagcacatctcattacccagttatgattgacgtcattctgagttacaatgatcttagcgacctgtgctcattatttgctccactaattctaattttcctcgcctttcatatttcgtatctttattctatatcctaaaatttttttggcaaatcccagatttggctttgattttggcatcggttcggttctttcaaatatcttcttcccgtgaatcaactgcacataccttaataactagttcagtttagtgctctgtctgagtgactgtaataataaattttacaagccacttctcatgacatatattggtaagtaacttcatcaatactaattagtctttgccggttacccatctggcccctgacttgcgatgcttaggaagttccatactcgcggctcttcccaacagtagcacatccgtgaaacttctggcgctattcattatgcagtaccaggacaagaagttaaaaaaaaagctctgttacaagttcaatggtggtgcaaggattgaagttattatccaggaggcacggatgcaaaagatagaagacaaattaatttccttaaaattcaaaatgctcattattgtcacgctgtatgagcatttggtgaagatttcactgggaaatgttgcaataatttgataatcgttcgtattggatgaaactgtaacatcatctgtttattaagtatccgtgttattagtatatcatcacatacggtgtaagaagataacataaagattgagaaacagtcatcaaatataatggaagctgaaatgcgaggattgatgatgtaataggacaataaaaaatataagacggaagaagaaataatcgtaatagcattatgtaaaaatagggatttgaggattcctatatcctcgaggagaacttctagtatattaactatacagaatatcatagccttgatcaacaataaaatcccagcaattatcaaattatccatccatttctcagtgacattctcactagatgagcgtttttgagaataatgctaacatttggtaaggtatgaaataaaatgcgatatcctccgtagttgtcgtccgatatagtgtaacggctatcacatcacgctttcaccgtggagaccggggttcgactccccgtatcggagatatatttaatattttttttgatttgacttcaaatgagaactatttttttaaagcatcgtgtggtaaacaagcttccaccgaatgagcttaagaaagcgcaaacaattttcaacctgacaaagcatacatcatttttcatacaagtccttgttaagtaactcaaaaaaatcattaacgagatggccaaaagagttgccgatgcgcaaatacagagagaaacgtacgattctaacgagtctgacgatgacgtgactccctccactaaggttgcgtcatctgctgtgatgaatagaagaaaaattgccatgccaaagcgcaggatggcgttcaaaccttttggttctgcaaaatcggatgaaaccaagcaggctagttcctttagcttcctgaaccgggcggacggcactggagaagctcaggttgataatagccctaccacagaaagcaattccagactaaaagcattgaacctccagttcaaggctaaggttgatgacttagttctaggcaagccgttagcggacttgaggccccttttcaccaggtacgaattatacataaagaatatcttagaagctcccgtgaaatctatcgagaatccaacgcagacaaagggaaatgatgctaaacctgccaaagtagaagatgtccaaaaaagttccgattcttcatctgaagatgaggttaaggtggagggacccaagttcacaatagatgctaaaccgcctatttcagattccgttttctcatttggcccaaaaaaagaaaatcgcaagaaagatgaaagtgatagcgaaaacgatatagaaatcaagggccctgaatttaaattttctggaactgtatcaagtgatgtatttaagctgaatccaagcaccgataaaaatgaaaagaaaaccgagactaatgctaaaccattttcattttcttcggccacttcaactactgaacaaacgaagagtaaaaatcccctttcattgacagaagctaccaagaccaatgtggacaacaacagtaaagccgaggcttccttcacttttggaacaaaacatgctgcggattctcaaaataataaaccatcttttgtatttggtcaagcagctgcaaaaccatcgctagaaaagagctcattcacgtttggttcaacaacaattgaaaaaaaaaatgacgaaaactcaacctctaactcaaaacctgaaaagtctagtgatagcaatgattcaaacccatctttttccttttccatacccagtaagaatacacctgatgcatctaagccatcttttagttttggggtcccaaactcttccaaaaacgaaacttcaaaaccggtattttcgtttggtgcagcaacaccatcggccaaagaagctagtcaggaagatgacaacaacaacgttgaaaaaccttcctctaagcctgccttcaatttaatatctaacgctggtaccgagaaagagaaggaaagtaaaaaggactcaaagccagctttttcatttggcatatcaaacggaagtgaaagcaaagactctgacaaaccctctttaccctctgcggttgatggtgaaaatgacaagaaagaagcaacaaaacctgctttttcgtttggaataaatacaaatactactaaaaccgcggatactaaagctccaacttttacatttggctcctctgcactcgctgacaataaagaggatgttaagaaacctttttcattcggtacctcccagcctaataatactccatccttctcattcggaaaaacaacagcaaacttgcctgctaattcttcaacatctcctgctccctctataccatcgacggggttcaaattttctttgccatttgaacaaaaaggtagtcaaacaactacaaatgatagcaaggaagaatcaacaacagaagcaactggaaatgagtcgcaagatgcaaccaaagtagatgctaccccagaagaatcaaagccaataaacttgcaaaacggtgaggaagacgaagtggctttattttcgcaaaaagcaaaattaatgacattcaatgctgaaaccaaatcgtacgattcaagaggcgtaggcgaaatgaagcttttgaagaaaaaggacgatccttctaaagtgcgcctactttgtaggtctgacggtatgggtaatgtattactaaatgcaactgttgtagactccttcaaatatgagcctttagctcccggaaatgataatctcattaaagctcctactgttgcggctgatgggaaacttgtaacttatatcgtcaagtttaagcagaaggaagaaggccgctcatttacgaaagctattgaagatgctaaaaaagaaatgaaataagagtaaatacagttaacaattttaaatagaatagaaccctcatattttgtagctcaaggttatagttgagcaaataaagaatacaaaatttattccaaaaaacactacgaatctatattttccagttctttgtctataatagatttggcagcttttgaagcccaagccaatcttctttcatccctatcaaaagctttatctcctttctttcctgcaaggaaattatggtatctaaatttcttgttaataaaccacttcaaacctttgagaatgaatagcatattttccgatttaacgttcttcgttaaaacatcgcgcaaataatcatcggagtagattatacgcttatttccactttcatccatcttgagtttcttctcactttttttagctacagttaaaaataactgaaatagcaatatctccataaataacatcccttctgtgtttaatccacccataaatggaacatgcttgaaaacatctaatttcaaaatgtcattagcaagcaacgatccaaaaaatctcccctgatttgagatgcgaagcagtttttctttatcatctaaatcatcttcttcgtcagtatcgctttcagaatcgaattctttgtcttcaaatttttttatcacatcccagaataggaattgaaacgacttcgataaatggctatacctttcacatattttgttcgcgaccaatgcgtagtaatgattataaccattggatccactatcagccaaaagacaatgtaaaacaattcttggaatttcaagaacttgcttatttttcaagcttaacttttcaagtttactaaatgcatccaggtaatcttgtgcagacataatacttataaatatagcccttcgaatgtcagtattcatacgctgttgtctggcgataatattccaatctggaatatcatcaagaagatcatcctcgattgaaattttagatttcttggacttgctggcatcattttcattattgatcgaaacttcaaaagcattttccatgtttcctcgccaagaagcaccaaccagccaccatttccccttggaatcaatgtttttaatgtcttccagagaaacctgtaaaggctcccaagaagaagaagaattcaaaatgctttgcaagtttttctttaatggatgatgatcagtcgccaaaatagaaggctttaacctgttgtttttcaagtcagacatggtatccattaaaaatctcaatcttgggctctgctcttttaaattcttggcgttcttcaacagttctgatcgtatatctctcagggcggatggatcatcaccccggatcagttgtcctgaaatcgatataattcgtaaaagtaactcagtagtgaattcattaggatctgctacaaatattcgaataatgtcatagattaagcgacacgaaacaaatccaaaattataacaatacgatagtaaggttgcaatattgatgcatattttagaggaaattttgctctgctgatcctttaatatattttccatttcctcttcgtaatgatgcagaaatgcctctaccgttttttgaatgaaaaaagcacccacctcaatacctcttagttttgataatgtatacgcaagagcagcataattcattataaatccgtccaacaacttctgattttggcttataatattcaatatccctttcgttaacgattctgtaacgtactgcctaggcagggaatcatacaatctgtttaaatcagtgataataatagtaatattggagtctgaaagcttattcaaagaggagttgaccttcttgctaatttcagacaaagtactattgttttcactatcatccaatttctttctcagtgatgggggaacatagctctctacagattgtgtgggagctacatagggattttccttttctcttctataattatcatccgagtccgcaacgctgtcgttatcagattcactaagcccatctgagtcttcaaaatcagaagctgaaagatcatcatccgaggaaaatgctttctcgcttgcttcatcatcttttctcatagaattagtttctgtggcaaaatctccatactcttcgtcacttttgccataattttcaaagtattccaaaccttcaagaagtccaccaatagcatcaaattcatcttttgcatgtatagccttcctttctcctttcaagcccaacttttttgcgtaatattgcatgtccatctcgtccctttcaaacgctgatctgtctgaaggggccagcggataactcacaaaattctcatttgtatctctgttacgaatatgtttcttttcatatgagttaccttttatttctcccgagttttcagctccttgtataccctttgctttccgtttcaatgattctagttttttcattgtttcttccgcagacattgcctgctcaccgctttcttctgctacttcatcagtaagcacttcgtcactatcccagttttcattactttctgattcatctgaagaaatcggatttttaccgttagcctgcttgcctacgtttttcacacctgcattagcactcctcttttcggacgttggtgctgattttagccggctggaattgatttctctagttgatataattttacgtttcttgtcggcccgttccatctttctcttttctttacggcttaaatgtttgccatttcctcgtcttctcttttttccttctgaaatagaaaacctttcatcttgactgtagtcaagagtcttcaactcgtccaaaataacgcctggaattctaataccatctgttttttgcattgcctcaatattctgcagctgtggactggctatctttagttaagatgaggcttcgtaagtaagttcagtagtcttgtaagctcatcgcatttttttttttttgctggattttatatttttcacagcgaaaaggacgggaagctaaaagattaaaaaataaatattgcagataccatatgtaatttagtaaaatatttttataaaatattattattttcttgttcttcagtgatttattgtaaccatggagaaatgctcacgtaaataatgttaagtccaatggcacactactaccctttccacttggatacagttttgttttattttgaaagggacgtggcttaggcatttgtgacacattagtccatttaaatcttgaatcatctataacaattctttcatttccagatttggccccaacgatagaattcgatccccctatcgtatacctacctacatcaacatctggttgatttgtatgcgtattatgcttgtgttgcagcgtcgatccacctgtagaaaataaccgttgtttaaggtttttactggggctattagaggtaccggtatccatcgtagatggacttggtggtgggggtggcgacttagtggggttcttcgaaattgattcagtttcggtacgaacggaaagtgtaggcgcaacaggaggaggtgatggtattgatgtagacacggattgctgaggcagacttggtgcactaaatgttggcaatggcggagcagctgcaacaggaggagaaggaggtttttcgagattcgaggagggaagaacatcgtgtaataaagaagcggcggggacattattcttgctatcatctgataaaactggtggaactggtggaggtggaacgtgtccaggcagtgcaggggcctttgcttttttcatccctaacacagtctcactcttatcattggtgtggtcatcacctgatgcagttggagtcggtagcgatgttataggaggaggaggtgcactaggaggcaaaggaggcgccatagcatccgtatgggggggtggtgcgttaaaagcattcgatgatgtttgcttatgtaatttggattcaatttcatccagaaacgacataccattttggctactctgtttaggcgggtttatagatggagaaataggagaaggtcttacgttatcatccttagatgaacctattacatcctcttgtttatcttgggtagtgtatccagtatcaccaccaaccacgaatctatcatctctcttcttttggatctcagcaagaaatggtaagggtcccccaggtgttacggccgaggaagaactggatgaagatattttggattgcttactggacgctgagggtttgtttgtcgtgagtgttggaggaggaggaggagccgatggtactgacgttgcaaccgaaggaggaggaggaggtggtagtggtgctaaaggaatagatgatgctgacaaggcagaggatgttgaaaaagcaccaggtggtgggggaggaggaggtggtggcgcgggcattgacgatgctttgttaggaggaactgatgtagtatttggtaacggtggtgctaaagttgggggaaccggggttgcttttacgctgttagtcgacgcagagctcatggctgctggtagtggtggtggaggcggagctggagctgaagttgcttttttaggtgcagaggtcacatttggtaacgatggtggaggtggtgcagtaggcggtaatggcggagcatgtgatgtaggaatgggcggagcagatgatggaagtggtggttgtgaaggagatttatgattttcggtttgaatctttgtggaagaaacgccctcgacggctcctcgttcagacctcctggcattaatttctgccaaaaatggcaacccgcctgcaggaacttcagaagatggtggtgagactgcgttatctgtaggtttaatgttttttgagtccaggccaattgttggagttgggggagggggtggagcttgtggagggttgctaacatgtgttggcagagacgctgaaggcaaagggggtgctgacacactaggaagagaaatattagagctttttctttggtggcttctgtgtgctggccttactgaaggcatatgcggtctattttgcggtacctttggagcagaggcacctgataatggaagcggtggtgctggagatgatggtacaatgggaataggaggggccgcagaagatggaatatcaggaattggaggtgcagaagacgagggaatactaggaacagcgggtgctggtgataatggtgcattaggaatggggggagccgcaacagatggcaccgcgcccggaattggcggtgcgctcgccgatggagagggtttagtgcttgcattgttattgatatgttttaacttcggtatacctccagctaaaatatcgcccaactgcggagcgcccatcccagggattggaggagctgacatagagggtcctttactactgacggtaccagaacttcctgaggccgatgaaacgacaccacctcccacgattggggcacttctatcattggtctcagctttctttagtttcattccctttctaatgtcacctaacagggcgtcacggccctgcatcacagattttgccggtttaggagcactaccacctaatgctggtggaggcggtggaggaggaggagctggagcacctgccatttcaacaattcgttatatatatggtaggcttcttcaacaaacggttgtgcgctttttagtcgtatgctttgtctcatatcaaaaactttcttcataagtttataattttagattttgttcaagtatttactgactgtgcggattattcttaaggcccctatttgaggacggcggccgcacccgtaagcagtgactaggttatgaacatttcattctttctaaagacgcttttagcaagcttcatacaggatagtaggatttgaaggctaacattgtgattccatcctctgtcaatgtttcgtaacttgaatatttgcgactttttccatcttttgtgagctaaaatttttatcttgcccttgtaatttgaacttaaaagagaatacagcaatgtagcggacaaaccgaacattgaaattaccattttaattgtaacttatcttgaaggagttccataccgtatgttatcaagatacttctcagggcaatatctacatttacatatttgcctgcttaacatccgaacatttcacattttgattatttcgagaaaaaagtcaaaaaatttctcaaagaaaaaagaagtaatgccgaactgagagtgaatgcatcacatcgttgcgaaaaactggtaaaaaatgacttcaagttataagtaaatgaaagattaacaatatctaattctcgattcttttttcaagtttcagccataagatacataagcggaatacctttaaacatcctgcaaacagtctaataaatacgtataataagtttgaaatgggaggcattcgtgaaaagaaagctgaatactttgctaaattaagagaatacttggaagaatacaagtctttgttcgttgttggtgttgacaatgtttcttcccaacaaatgcacgaagtcagaaaggaattgagaggcagagctgtcgtcttgatgggtaagaacaccatggttagaagagccatcagaggtttcttatccgacttgccagacttcgaaaagttgttgccttttgtcaaaggtaacgttggtttcgttttcactaacgaaccattgactgaaatcaagaacgttattgtctctaacagagttgctgctccagccagagctggtgccgttgctccagaagacatctgggttagagccgtcaacactggtatggaaccaggtaagacttctttcttccaagctttgggtgtcccaaccaagattgccagaggtaccattgaaattgtttctgatgtcaaggtcgttgacgccggtaacaaggtcggtcaatctgaagcttccttgttgaacttgttgaacatctctccattcactttcggtttgactgttgttcaagtttacgacaacggtcaagtgttcccatcttctatcttggatatcaccgatgaagaattggtttctcacttcgtttccgctgtcagcaccattgcttctatctctttggctattggttacccaaccttgccatctgtcggtcacactttgatcaacaactacaaggacttgttagctgttgccattgctgcttcctaccactaccctgaaattgaagatttggttgacagaattgaaaacccagaaaagtacgctgctgctgctccagctgctacctccgctgcttccggtgacgctgctccagctgaagaagctgctgctgaagaagaagaagaatctgatgacgacatgggtttcggtttattcgattaagaagtgcaacatgaattattaagttaatttcatatatactattttataattaaataacattaatcctcattgattcattttattcatgataatgtactgtccggttccttgcgctagcctgagttagtctccgaatacctggcgattttcatatattctgagcggctctggacacctaactggataaaaatacttccacttaatgtagtttggttttctagttcatacggactatttcaaagttcatgatttgatgagagaaagtagctatactatcttcccaatttacgcttgtctctgaacaaaggtttttatcctttatatgcttattgaaatactgagaataccaaaagttgtctttttctctactatcgcttgattctttcaagacgtcggatataagaaatgtcacaaaatcaaaaatagctgcgaggaaataatgaagaaaagtaaaagacgaaactactgcttcgatgagaggtgagcagaagctcccataaaaaaaaaaacctatcttgcagtatttctatgttccttaagagatcaatagaagtagaatatgtttcgaaggggagataattcaaattttaacgtacaaaatagcttctttcttcctttggaatacgaatataccgtaaaagataatgtaccttcaaaaaaaaagagtagtataggtttttttccattagatgattctttattcacatcaaaaaacaattcagggcaccataaaagcgaacagctccatcgcggtaatgcagaaactatcagaagccagtttggaactgacgcagttccgataaggatcgatgagaaagaaggaaagtgggatagaattcaagatgataattcttctaatttaaactaccaaattaacaacagtaatgacccagcttcgagtggtaaatatacccagagtattgactgtaaccatatagcggagtcaaaattttcaaaaaaaaatggaaacattgatagtcttcgttcaaactcagcaacttttatgctaaatactgcagatgaagacgtgatagaatttagttttgacgataatgtcccttatgctgagttattatctggtgccacccttgaaaaatgttcgttgactctaaatgaaataaacaaaaaactattcaatacgctctatgactttcgagtaagcaaagataatcccgaagaaaatttggtagaactaatacttccgaactgcgtggtgttattaaacttttttgaagacattgaactcttggccgactcttctgatgaggctttcgaaaaatctactttcattaacacaattgagttcattgtgcacgatatttgggtcgaaacgttgataaagaacataaacttattacaaatgtttgatgcagatttgaaatgctacaatgacaagtacataatttgcaagctaaagggtcagtatccctccacaaatatagtggacataatgtgccgtttgaagcatttttccaattctattttggaaactttcaaattcggaatcgagctaaaagaacaagatcaatgccacaatagaaacactattatcaactacgttcttttcagtagagtattttcaacgattgttttagagattcaaaaatgctttatcttgatcgttaagttcatgtattctgtcaattttttagaaaaattttccgatgaagtatttttgtcatttattgaaattctcataaaaattgtctttgagcaccagattccgcagttatttttgggaattgatgaaattattcaactctggttaaagaacaatgaaggaaaacggcaacaactcttgagcgcttggtgcaacggaactgttcaagatatgaagcaaagccaacaaagagagtcctcaaacgcagaatctgaatcaatcacttcaagtacagaagaggacgaagaaggcctccaattcaataaatgggatgtgattgaaccatttattgataatatcaaggctttgaatcaatcaaaatcccatatgtgacgcagcgataaaaccgcggcatgcaaacatctacacaattagcaagggcaatccatattttgtcttttcgcgccctggaaaggcctaagtaatgtcgtaaacgcattctatctgtacttcaactctcctctgtgcattggtttgtgcaaatcacattttacgatactgccagatttatgcaaaaagagaaaaccaagggaccagaacaaagcaaaattacgataaacttcgaattccttcgtgcttgactaagacaaagggatggacgtagcgatttttagcgggccaagaactggttccgaaaaagcacaggtacaccgaaccctcagctaaggagggacagcaccgatgcggaaggacaaactttctttttgcctatcacagtatcttatcgagctaactattttcgacacacatgaaaaagcagaaatattaacgaaaaagaaaagaaagaccatgtcatgtacgggcaatcagaatctgtaacaagcgccatttttttttctgtatcgggccctccttactgctctccttccgtgtaacgcgttatgaaactctaatcctactatcggcgactctctcgaaatttttcttaacgcgtccttgtactgcgtctaacgcttttgccacttggatttctattataggaaatagtctcacttactgggcgacgaattttcgcgttttgatgaagcacaggaagaatttcttttttttttggcttcttctggttccgttttttacgcgcacaaatctaaaaaaagaaataattataacctagtctcgaaaattttcatcgatccattcgttcctttttttcgattttttcagatcaaaattcttgtttctttctttgtcttagtttatattaaaagatattttgattttactcctgaactatttattctttctaagaaggccagaacactacagctgttttaaccgactacgaagttctccattctcgaacactagccttcatttaccaaacaggaactagcgtatatcattagtccttattcgaaaagagattggtagatatttattgtagtttgtgagaaggagaaaatactgtcattggactgatagttagaggacattaacctctcttacgttcgctcaaaaaaattaaaataagcaagtagctgaaatcaagtctttcatacaacggtcagaccatgaacactgatcaacaaccttatcagggccaaacggactatacccagggaccaggtaacgggcaaagtcaggaacaagactatgaccaatatggccagcctttgtatccttcacaagctgatggttactacgatccaaatgtcgctgctggtactgaagctgatatgtatggtcaacaaccaccaaacgagtcttacgaccaagactacacaaacggtgaatactatggtcaaccgccaaatatggctgctcaagacggtgaaaacttctcggattttagcagttacggccctcctggaacacctggatatgatagctatggtggtcagtataccgcttctcaaatgagttatggagaaccaaattcgtcgggtacctcgactccaatttacggtaattatgacccaaatgctatcgctatggctttgccaaatgaaccttatcccgcttggactgctgactctcaatctcccgtttcgatcgagcaaatcgaagatatctttattgatttgaccaacagactcgggttccaaagagactccatgagaaatatgtttgatcattttatggttctcttggactctaggtcctcgagaatgtctcctgatcaagctttactatctttacatgccgactacattggtggcgatactgctaactataaaaaatggtattttgctgctcagttagatatggatgatgaaattggttttagaaatatgagtcttggaaaactctcaaggaaggcaagaaaagctaagaagaaaaacaagaaagcaatggaagaggccaatcccgaagacactgaagaaactttaaacaaaattgaaggcgacaactccctagaggctgctgattttagatggaaggccaagatgaaccagttgtctcccctggaaagagttcgtcatatcgccttatatctgttatgttggggtgaagctaatcaagtcagattcactgctgaatgtttatgttttatctacaagtgtgctcttgactacttggattcccctctttgccaacaacgccaagaacctatgccagaaggtgatttcttgaatagagtcattacgccaatttatcatttcatcagaaatcaagtttatgaaattgttgatggtcgttttgtcaagcgtgaaagagatcataacaaaattgtcggttatgatgatttaaaccaattgttctggtatccagaaggtattgcaaagattgttcttgaagatggaacaaaattgatagaactcccattggaagaacgttatttaagattaggcgatgtcgtctgggatgatgtattcttcaaaacatataaagagacccgtacttggttacatttggtcaccaacttcaaccgtatttgggttatgcatatctccattttttggatgtactttgcatataattcaccaacattttacactcataactatcaacaattggtcgacaaccaacctttggctgcttacaagtgggcatcttgcgcattaggtggtactgtcgcaagtttgattcaaattgtcgctactttgtgtgaatggtcattcgttccaagaaaatgggctggtgctcaacatctatctcgtagattctggtttttatgcatcatctttggtattaatttgggtcctattatttttgtttttgcttacgacaaagatacagtctactccactgctgcacacgttgttgctgctgttatgttctttgttgcggttgctaccatcatattcttctccattatgccattgggggggttgtttacgtcatatatgaaaaaatctacaaggcgttatgttgcatctcaaacattcactgctgcatttgcccctctacatgggttagatagatggatgtcctatttagtttgggttactgtttttgctgccaaatattcagaatcgtactactttttagttttatctttgagagatccaattagaattttgtccaccactgcaatgaggtgtacaggtgaatactggtggggtgcggtactttgtaaagtgcaacccaagattgtcttaggtttggttatcgctaccgacttcattcttttcttcttggatacctacttatggtacattattgtgaataccattttctctgttgggaaatctttctatttaggtatttctatcttaacaccatggagaaatatcttcacaagattgccaaaaagaatatactccaagattttggctactactgatatggaaattaaatacaaaccaaaggttttgatttctcaagtatggaatgccatcattatttcaatgtacagagaacatctcttagccatcgaccatgtacaaaaattactatatcatcaagttccatctgaaatcgaaggtaaaagaactttgagagctcctaccttctttgtttctcaagatgacaataattttgagactgaatttttccctagggattcagaggctgagcgtcgtatttctttctttgctcaatctttgtctactccaattcccgaaccacttccagttgataacatgccaacgttcacagtattgactcctcactacgcggaaagaattctgctgtcattaagagaaattattcgtgaagatgaccaattttctagagttactcttttagaatatctaaaacaattacatcccgttgaatgggaatgttttgttaaggatactaagattttggctgaagaaaccgctgcctatgaaggaaatgaaaatgaagctgaaaaggaagatgctttgaaatctcaaatcgatgatttgccattttattgtattggttttaaatctgctgctccagaatatacacttcgtacgagaatttgggcttctttgaggtcgcagactctatatcgtaccatttcagggttcatgaattattcaagagctatcaaattactgtatcgtgtggaaaatcctgaaattgttcaaatgtttggtggtaatgctgaaggcttagaaagagagctagaaaagatggcaagaagaaagtttaaatttttggtctctatgcagagattggctaaattcaaaccacatgaactggaaaatgctgagtttttgttgagagcttacccagacttacaaattgcctacttggatgaagagccacctttgactgaaggtgaggagccaagaatctattccgctttgattgatggacattgtgaaattctagataatggtcgtagacgtcccaagtttagagttcaattatctggtaacccaattcttggtgacggtaaatctgataaccaaaaccatgctttgattttttacagaggtgaatacattcaattaattgatgccaaccaagataactacttggaagaatgtctgaagattagatctgtattggctgaatttgaggaattgaacgttgaacaagttaatccatatgctcccggtttaaggtatgaggagcaaacaactaatcatcctgttgctattgttggtgccagagaatacattttctctgaaaactctggtgtgctgggtgatgtggccgctggtaaagaacaaacttttggtacattatttgcgcgtactttatctcaaattggtggtaaattgcattatggtcatccggatttcattaatgctacgtttatgaccactagaggtggtgtttccaaagcacaaaagggtttgcatttaaacgaagatatttatgctggtatgaatgctatgcttcgtggtggtcgtatcaagcattgtgagtattatcaatgtggtaaaggtagagatttgggtttcggtacaattctaaatttcactactaagattggtgctggtatgggtgaacaaatgttatctcgtgaatattattatctgggtacccaattaccagtggaccgtttcctaacattctattatgcccatcctggtttccatttgaacaacttgttcattcaattatctttgcaaatgtttatgttgactttggtgaatttatcttccttggcccatgaatctattatgtgtatttacgataggaacaaaccaaaaacagatgttttggttccaattgggtgttacaacttccaacctgcggttgattgggtgagacgttatacattgtctattttcattgttttctggattgccttcgttcctattgttgttcaagaactaattgaacgtggtctatggaaagccacccaaagatttttctgccacctattatcattatcccctatgttcgaagtgtttgcgggccaaatctactcttctgcgttattaagtgatttagcaattggtggtgctcgttatatatccaccggtcgtggttttgcaacttctcgtataccattttcaattttgtattcaagatttgcaggatctgctatctacatgggtgcaagatcaatgttaatgttgctgttcggtactgtcgcacattggcaagctccactactgtggttttgggcctctctatcttcattaatttttgcgcctttcgttttcaatccacatcagtttgcttgggaagatttctttttggattacagggattatatcagatggttatcaagaggtaataatcaatatcatagaaactcgtggattggttacgtgaggatgtctagggcacgtattactgggtttaaacgtaaactggttggcgatgaatctgagaaagctgctggtgacgcaagcagggctcatagaaccaatttgatcatggctgaaatcataccctgtgcaatttatgcagctggttgttttattgccttcacgtttattaatgctcaaaccggtgtcaagactactgatgatgatagggtgaattctgttttacgtatcatcatttgtaccttggcgccaatcgccgttaacctcggtgttctattcttctgtatgggtatgtcatgctgctctggtcccttatttggtatgtgttgtaagaagacaggttctgtaatggctggaattgcccacggtgttgctgttattgtccacattgcctttttcattgtcatgtgggttttggagagcttcaactttgttagaatgttaatcggagtcgttacttgtatccaatgtcaaagactcatttttcattgcatgacagcgttaatgttgactcgtgaatttaaaaacgatcatgccaatacagccttctggactggtaagtggtatggtaaaggtatgggttacatggcttggacccagccaagtagagaattaaccgccaaggtaattgagctttcagaatttgcagctgattttgttctaggtcatgtgattttaatctgtcaactgccactcattataatcccaaaaatagataaattccactcgattatgctattctggctaaagccctctcgtcaaattcgtcccccaatttactctctgaagcaaactcgtttgcgtaagcgtatggtcaagaagtactgctctttgtactttttagtattggctatttttgcaggatgcattattggtcctgctgtagcctctgctaagatccacaaacacattggagattcattggatggcgttgttcacaatctattccaaccaataaatacaaccaataatgacactggttcccaaatgtcaacttatcaaagtcactactatactcatacgccatcattaaagacctggtcaactataaaataatacaatcaatacttgcttgaacgcttgattttactgatattctatccaaaagcaagtagaccagaaactctcaagatgttgcaaataccgttcgatgtttttggtttagattgttttaatgttgatgcttttttacttatttttggaagcgtctttttaatttagttttatattataggtatatgaatgtgtttatgccaataagggtttttttgtacagttatgtgattataaacagtcttttgtctagtttttttcaccagtatcggcctctatttataaaaaacggagcagctttcggtgtcagtaattctgaaaaaatttgtgtcactctgattgtaaatgaattaatttagctagatagttgcgagccccaacgagaagattgtcagacaaagacaacattcaacaacctacatccgttactattcgttaactcgaggtacttgaaacttttcagttaagtatgaacaagaaacaaaatttttacgcagccattattgtggctatttttctttgtttgcaattgtctcatggctcttcaggtgtcagctttgaaaaaacccctgctattaaaattgtaggaaacaaattctttgactctgagagtggggaacagttcttcatcaagggcattgcttaccaattgcagagaagtgaagaggagcttagcaatgcaaatggggcttttgagacaagttatattgatgccttagcggacccaaaaatatgcttaagagatattccatttttgaaaatgctaggagtgaacacactgcgtgtttatgcaatagatccgacaaaatcacatgatatatgtatggaagctctatctgccgaaggaatgtacgtcctattagatctttcagagcctgatatttcaataaatagagaaaatccatcttgggatgtacatatttttgaaaggtacaaatctgtaattgatgcaatgtcatcctttccaaatttgttggggtattttgcagggaatgaagtgacaaatgaccatacaaatacctttgcatcacccttcgtgaaggccgcaatccgagatgccaaggagtatatttcgcattctaatcatagaaaaatccctgtcggctattcaactaatgacgatgctatgacaagagacaatttagcaaggtacttcgtttgcggagacgttaaagctgatttctatgggataaatatgtacgaatggtgtgggtattccacgtatggtactagtggatatagggaaagaacgaaagaatttgaaggttatccaattcccgtgtttttttcggaattcggctgcaatcttgtaagaccaaggccattcactgaagttagtgccctttatggcaataaaatgtcctctgtttggtctggtggccttgcatacatgtattttgaagaagaaaatgaatacggagttgttaagataaatgataatgatggagtggatattcttcctgatttcaagaatttgaagaaagaatttgcaaaggcagatcctaaaggcattacagaggaagaatacttaacggcaaaagaaccaactgaagtagaaagtgttgaatgtccacatattgctgtcggagtttgggaggcaaacgaaaaactacctgaaacacctgatagaagcaagtgcgcctgtttggatgagattttgccctgtgaaatagtcccttttggtgctgaatctggaaaatatgaagaatattttagttatttgtgctctaaggttgactgttccgatattcttgcaaatggcaaaaccggtgagtacggtgaattctcagattgttctgtcgaacaaaaactttcccttcagctgagtaaattgtattgcaaaatcggcgcaaatgatcgccattgtcctctaaatgataagaacgtttacttcaacttagaaagcctgcagccccttacaagcgagtcgatctgtaagaatgtttttgattctataaggaacatcacatacaatcatggcgattattcaaaatcaaatccatcgcgtagcaaggaaagtttgaacgtaaagtacccatcgagtgaagagagagaaaatgacggcaccatcgcatttaaaacttcagggtttgttatacttctaatttctatgatagctgctggaattcttctataaaaaattcatttaatattcaatgaagttataaattgatagtttaaataaagtcagtctttttcctcatgtttagaattgtattaatgtacgccgtttacgttggagtgtaaatgtgtctattccagaacgaaatctaaatgagcagtacaggcagttcagatggtactgaagcggtactaaagatgcatgaattgaacagatgtggtagttatgtatatgaggaatatgagttgtcacattaaaaatataatagctatgatcccattattatattcgtgacagttcgtaacgttttaattggcttatgtttttgagaaatgggtgaattttaagataattgttgggattccattattgataaaggctataatattaggtatacagaatatactggaagttctcctcgaggatataggaatcctcaaaatggaatctatatttctatttactaatatcacgattattcttcattccgttttatatgtttcattatcctattacattatcaatccttgcatttcagcttcctctaacttcgatgacagcttctcataactcatgtcatcatctaacaccgtatatgataatatattgatagcataaccattagttgataggtgatggtggaattttatttcaacagttttatacctctcttatataagcacaggaaggtccatatccacatttaaacttgattaatacttttttttatacctttaactatcatcatcaataatttcttttctgaaagtacgacatcaaagtcgccgagttttgtcttcggaataaatactaggtcagatgaataaagagcaggaatttactatctctgataatttattatgctcctctagtgcaatggttagcatgcattcttccggtggctgtgatccgggttcgagtcccgggaggagcttttaattttttagcgcactattctaatttttaaggaaaaagcatatttccgagtcagtgcatagaaagaacggaggctacgatgccagcacagtgtctataaagtcaagaaatacattcaaactcttcgcgtaagggctgtcaatttttcatttccctcaaagttaatgcgcaagagttaggatgatcttgattattagttatttgtttgttccatcaattatgccgacgtccatgaatgctattgaagtatcgattacttatgctattctattgtatttgagccggcggctagtaaacaagacagcatacctttccaacatccgtacatattgattattgtatctatgattttcatgtaatgtatgggttaactaatcctttctcttcttttttttttttctgaaaatcagtagctagaggaacctgttcgtgaaagatatggaatattccgtctagggaagagccgagagctgagagcagtatccatcggatggaatcttgcctggatgcgtaacgacgacagcttgtctagaaggcgaagtacaagatactaagaagactataacaacagaagacaattttgtagtgcgattctatattattgacgtaaccaacaaaaaagtatcagaatggctaaacaatcattaggtatgtgcacaaatgctaaatcactgaaaccctgtagagctggaattgaaaatatagtttgtaccttttgcctgagggcagaatgactcaatgttatcttaattcgattagaaaaagaaggtgcgttatccaaggttgaaacttgtaaactatttaggtgatgtctcataactgcaaccactggaaaatgacgcaaatatcaaaataatagggagataaagtctcacgacatgaaaaaatcatagaattattgttcaatttatctagccgtatcttaccttatggaaaaagtgtgaatatgtttttctaaatcgagcttcccggaaattacactatattatgcatccgtgatacatctgaaattcaatactttctccaaggtcctgcttactaagagggtaagatttgttgaaactcgaaatactaacattattttcattattttagacgtttcctccgacagaagaaaggctagaaaggcttatttcaccgccccatcctcccaacgtcgtgttttgctatctgctccattatctaaggagttgagagctcaatacggtatcaaggccttgccaatcagaagagatgatgaagttttggttgttcgtggttccaagaagggtcaagaaggtaagatttcatctgtttacagattgaaatttgccgttcaagttgacaaggttaccaaggaaaaggtcaacggtgcttccgttccaattaacttgcacccatccaagcttgtcattactaaattacatttggacaaggacagaaaagctttgatccaaagaaagggcggtaagttggaataaattatgtaattccctgaaaacttcctcgaaatttattgcactttttttactcaaaccatttaataatcatatgtaaaacgtataaaatagtatccattccactgtactcagtgtcttacgtaaagggctgtatactggcactaccttttactatggatatgtgctagctttttcggagaagaaatgttcgccttacgctagaaaccggggttaagggggcgtgagaatgaatattggcagacaagaaccgagatagaatcttaacacaaaaacagttcatcctacttctacgcctttatacagttatactgaaagatctttgcataggggcatagtttaaaataaaatatagggttgtcatagcaaacatgccaaatgtgctttctgatgatgaagagctccttaatggactaggaagtgagattatgaaaccctctagacaaggtaaccatatggcaaggaccgtcaaaaggtgggtaaataaagaacgtgctaccacagccgatctgaaaaatgttaatattgatggagttcatggaccggtaaataccgaaagttatatatcaccaggacagctttactccactgactcgggcaatttatttcatgctggaagaatccttgtcgttctagtcggtcttccagcaacatcaaagacactattgtcagtagcgattacaagatatacaagatggttaggagttaggacgaaatcgttccatttttcagaatataaagaatcagctaaaaatataccctcagactatttttgcgtagtgccaacgtcaaaagaaggtgtagcgtttgttgaaaagcttcgcatgcagatgttgaatgatatactggcatttttcaacgacttgtcaggtcagctggccatttatgatgccctaaacatccgtaaaattgacagaaagaatttggagacaacgttttctgaaattggagttaaagtactcttcatagaatcaatcgtgtctgatcaagaaatcatgaatagaaacatagctcttgcactggagtcgaacgattacaagggactttcaactgatgaagccattgacgaatatatgagacgtttatcagtgaacgaaccatactatgaaatgatgacacatgacgaagaattatcgtacattaaatatataaatttgggaaagcagataattgtgaaagataacatacatggttatttggtcaacaaaatagtatttttcttaatgaatttgaggcagaaaaaggggtgtgtatattttgctcgctgtggcaccagcgataaagacaactacatacatgatgaggaactaaacgaggagggaatccattactctcaagttctcaaggattttgtcctccaacgaattaaacagaagagacaggccaaaaaaaattcggattccttagtcgaagtaatagatggaagtcatgatgaagatttgaagacttccttgatagtttggacaggtcccaggaaaagaacccacgatactgcactctttttttcaaaagaaggtattaaagttcagcaacggtcagagttgagacagttgaacccaggaagtattgctgatcttactgatcaacagataatggacaaatttccatcagaatataaagaatcattaaaagacccatatcattttcgattccctagggcggaatcttaccatgacttagccgttcgtatggaacctttactattagaaatggagcatacgagcaaggacattctcatcattgcacatgagtcaacattaagagtattatatggctatttaatggcttgcacctgcgtagagttaccaaatctaaatttcacaagagacaaattagttgaaatttcattcagccctttctgtaatactgtagagttactgaacattcctttaactagctaatatactggagttgcatcgttgatgtgtattatctatattcaaaatagttatttttatgtttaagaaaggattaagaacaattgaaaaaaaattaccattagcaacgaatattaaattgtaaattatttagagatatttttctataatatgctcgcctaccattctcttttatacaatatttaggttttacctggaggctaaaatgatatgaggggacgatagcttaacatgattgtgacacaaactttaaaaaaggctttcagttgaagagttttcttccgctatagtctccaatgctatcttacttttcttattacgtttatgtctacctttcatatcatttcttgtaagcaactcctgcatttccgcttcctgggcagccttgagtaaatcatatctggtaattttatcaggtttattgctcacatatctgcctgaaccaacaacgttgatatatttccatggacatgctacccactctgcaatagtggaagctgaattgattgtgttttttgaaactaacccgatgggacaattactgatcgattgcattattaaaggtgataaataatcctttgttatttgtgccccttaaaattcatatacactttatgtttaattcgacaggtataacagaaagaaacaaggaaaacaatgcaattaatcattaactgcaccaacttttatatgaatatattgtgctacatgtcttaattagtcctctgtgaatgagcatcacaaagaatcacgaggaaaagattgattacttaatattgataggaatcagccgcggaaatggaaatcttggtaatataattttaatgcggcacgctgaaaattgatggcggcctgctaggagccctattgattccgcggaaataggcggattattacaaacgttgagcattcagcaggtgcgctgtgccttttcactttcagctaagatgtttgcaagcaagaattaacagataagccgcttcgctagtaacgcaactcattgtgtttttaatggaagctaaggatggttgaaattatgggtaccctgagataagattattaactatgatgtaagtattaatcattataataaggggtacctgctcattcgcattaccatacattgactattaacgagcagaaagtttttggaagttttgcagatgaagtgcatgtttgataatttgaatatgcggatttccttattcaaaactttctttatgcatagagctaattaggtttgagttaaggaaaaaaatctatcataagtgtcttgaggtatttactataatgtatacgggaaatattaggtgtgataggctctaggaacgaatattaatattgggggggggaaactggaatgaaattaaacaaaagcaaaaaaatctaaaagaagaaaaaaaggagagagagagagagagagagagagagagagagagagagagagagagagagagagagagagagatgagggttattgataatataatataataataaaagagaagatagtagaaaaggaagaaagaaaaaaaaaaattaagatgtactttaataaaaagagggaaattctaaaaagtgcgactggaattagaagaatgcaggtattttgttttctctcctatgacggagaaggtaacaaaatcataaaggtaaaataacaaattaattatgatcaaagagaaatgccctttgtaaaccgtggtttgtaaatgcgttggtaactgcagcagatgttaagaaacaaagatggaaaagaaccaaaatcagcttgtaagttctatcgtaattataaggataattgacgcttctgttgctctctagcccatcttgctgtatcttttgtggcttgactgaacaattggccactcctagttcttttaatgtaatcaataacccagtcttgtccataaaattgtttgattgagccgtctggaaacatcgctgctatatcaccaatcaatccgactgctgctcttgaggtagcatcctcactgtacagctgaggatcttctgcaacttgtgcaatgaactggaatatagtaccaacataagggaacagagcttcaggtttatcatgaagacccgctactatacccacataagcatctagtactgcttctagtacttttatttgataatcaagggcttctaatgtgccgttttccggcttcgtgttttgggcagcaacacacaacgccatgatgtcattcaagtagggaataaaatcagcacctatattggaagcaatatcaccgaacacgctcaagacggctggtttcaactctctccttgcatttggattagagatcatttgagccaagacattcatcatagcatcggaatatcttctgaaatcttcttctaacgaatttgaaatatcagcgatgaagcccactgcggtgattgaaactggcgaatctacttgatttaaagcctttaataaatagggagaaaatgtttccaggtatttctcaaatcctttacccaaagaagcagctagagctgaaatagcataaaacacatcgtcttcaataaacgcagagtcctttttttccaacaacctgaagaacagtcccataagcatatctgcaaccggttctacactacttggactttttctaataacggctgctagaacagtcaatatatttgactgcaattcttgcaaactttgcgcatcttctaacgttaattgattttcatcaacactcattgtctgccctaatttgtccataacaaacgtagaaatggaggcggaagtttcagctaccgtgtccgtggcgtattcaaccattgttgtcaaggctgaaaaggcggatgcacgggcattgaactcattatcaattctatttgcagcaccgatcaaaccatctacaagagcgggatagaagttatagattggagatggtgtggcttctgctaattgttcgactaagttgataatggtccaagaacagtttgtggccacttttgggtgatcttgcaacccaattaaacaagcttgaacgacacctggaagatgctgttgtgggtcgatagattcagcaacagaatcagcaattctaccaatacaccaagcagtggtttccttaacttgtagggattgatcgttcattaaattcaaaatagatggtaaggcttggtgaacgtaataggttctttggaccttatcagggccatccataatggaaccaaaggccattacagcagcttcacgattcctccagttgtcagcggtaatattttgttcaacaaattccaatacaggttctaagatatgattgccacagttttgggcaaacaactgcaagcatgcacctgcggacatggaaacattccaatcgtcatcttctggatcttcattttgtctcgttagaaggttcaacaaattggggacaacatctttaatagaagagagagcgaaattataactctgtaaaggagattgaggaaattgagcgagctcataggcaatatcgatttcttcttcacaaatagtggaccagaattccacagtcatggaagctactttatcatttggagatttcattgtagctatggtcaatgcatatagggcttgctccatgtaaggtttcataaatgtatagtatagtgacatgattttacacaaacaaccaaaggcagctgcttgaacttctatatcttcagcttgagtggcttcacagacgacttgcataaggtagtttctttcaccttcgcgttccatgttatttttgatgaaaattaaagagtctgcaagagcattcagagctgccagtctgactgctttggaagtttccgtagattgcgcaccctggacaatagcgattaagatattgtttgatgaagaaactaaggcttgactttgagggtctgcactttcacacatataacccaaggccaataaagaggctctcttgacattttctggttgttccgcacctgtattgtcaaccataattttcatcaactctggccatgcgccatggggcaactcaatatctgctatagccgcaatcaattgagctgctgcatttgctatacgcggttctatggagaccaatgcggtcagcgcgttagttttaatttggtttttagcttctggactaacctgtgtaatccaacgttgtgcaaattgctgcgtcttgactgagtccttggacaccagctcgttcttcaaagttagcgccgctagaatacgcccttctagctttgtattttcatcgataagcacttgcgaagaaagacctgcaaattgtaagaagttgtcattagataatttctttaattgcgtttcactagtcaaccgaatgttttggtcgggacttaagatactgttctccaatagttgagcaaattcagcggtggacattgctccttgtgtgatatgatggattactgttaaatcagttttattctacccctaaaaaccttgcaaatataaagagaaaaaggacagataattctccagtaatattatcctttacttcttaatgatatctgttctttaagcgaaaaatacaagaaaagaaactggagagtttacgtatatttgcctctcttcgcagttatttttcttttttttttatttttttttccttggttctctcatccaagtttttccttattgcccttccagcaaaattcgaaaattttctttctcgccaaagaattctatactcgtttaacatgatacatttatcggaacatcggtaggaagtggcctgcgactgactatccatttgatcgctgcatgaggaatgctggttatctatgtatcgggacatggttgcaacgtttccaacaagaacaagaatagaaaaaaaaataccgaaagcgtcctttgcgttatacctaccaaccgtgtacaagctttactcttcttgctttctttatttgctatgtatctttatgtttatatgtatataaatctgcctacttgtcttcctttggcatgccaaccctatgttttttcaattgctcaattgcaaagaaaattaacattgtgaatggacccagtctagtgaaacttggcaaccacccccggaacatgaaagatgggccctctttgcggacagcgtcggcaaggatcttcaaagccggttgatggtctccgctgccgttcatgatacgtgtcttcatgacgtctgctggagagcacacagtggtggccaccaggccagccaacagggacgctgtcaagtgtgtatagttcttggatgcgtcgaaatctaattttgtgaccaagtagttcttaaacacgtcatacgtaacgacctgacttgccgtcatcagtatgcccctaaccatgttaggcttccaaccggtaaacaaggttttcagtccaccctcgtagcgatatatcttgtacacaccatcgatagcgtttttgtagtttctcctcttcgctgcctccaaagcagagtcgttttgcattctgatatttacaacatctgcaaaattccctgcaagccccccaatggcaccactgaacatggagcaaggtaaaagatacgccatgttagtcaattgctcgcgtgggatcacattctctttcaacaagtcgtatgcaccgaatctcaccgtcgtgtatgtacattgcctcaacacagcagcgctcaggccggaatataaccccaccacaccttcattcgccaagatactctccaacatcctgaagagtgtgggcttgggcataggagccgcctgcagtctgactttggccaagtcaagaggatgtgtcaccatggtagcaaagatacccgctgcacctccgtaccaccatggatacttgatattcttaccggcagactcttttgcgttggttgacatgccgtccagctgttgcgttatcttttcgacactttcagagcaagagaaacgaacctctacacataaatatgcatacgattatgtatatccatatatatatatacactacaagccgaccgcccgaccgtttcctgcccccaacattgcagcgtaatcgcttgccaaagaccacaccttgcagcccttttatacaaacatgtctacgacgtacagtggagagggccctttccttggcactcaactgagattgcgacgcgataccttctgcgaccgttcctactatcgcggccataactccaacaacgacagcggatgcgctgttctgcggatgcgtgaccgtatccgcaaagaacgaagattaaatttagggtccccggcattgaggatggttctgccaagaactcacgatataaaccagttggttgagcatcgcatggatgagtatggcgtattttgattgctcatatatagtgggggggaatactcatgctgtgaaaagcacaactcttttcactcaacgaggttaatgccttctttgtctccacgccgtttttttctggcgcccttttgagaaagatagcctgtcccgtaatcgtggctttggcagagacagagggtgagcgaaagagcgggcgaaaccgagaatggattccgagtaaaggattgcgatggcatgaaacaaaaccgagaggcactccttgtaaggacacacatacacagacgtaaacatatatatacatacgtatactcaaatatatcttcgtatcattaggtcagcttctctcttccgcacgtagaattagagaattaacgcaagactataccattataaaaacgcataagaaacagtttcatcatgattgaccgcactaaaaacgaatctccagcttttgaagagtctccgcttacccccaatgtgtctaacctgaaaccattcccttctcaaagcaacaaaatatccactccagtgaccgaccataggagaagacggtcatccagcgtaatatcacatgtggaacaggaaaccttcgaagacgaaaatgaccagcagatgcttcccaacatgaacgctacgtgggtcgaccagcgaggcgcgtggttgattcatatcgtcgtaatagtactcttgaggctcttctactccttgttcgggtcgacgcccaaatggacgtggactttaacaaacatgacctacatcatcggattctatatcatgttccaccttgtcaaaggtacgcccttcgactttaacggtggtgcgtacgacaacctgaccatgtgggagcagattaacgatgagactttgtacacacccactagaaaatttctgctgattgtacccattgtgttgttcctgattagcaaccagtactaccgcaacgacatgacactattcctctccaacctcgccgtgacggtgcttattggtgtcgttcctaagctgggaattacgcatagactaagaatatccatccctggtattacgggccgtgctcaaattagttagttggctctgcctatacgcatatatgtatatatatatatatatatatgtatgtatgtgtatatgtatatgtacgtataccttacatcatcatctttctttatattctctctaatgcgcatttacatcggagtacacgtcaaatcttctttgtttggttaagggtaccgcttgtctaaatgactcaatgacttcgggatctaattcagcataaataatctcttctccctcgccagcttcagctacaatcttgcctctagggtccaccactatagagtggccatatgcatggtaagaactctgtagattccttgcgggagaacataacatcacgtacacttggttgtcaactgccctgcttcttgccagtaaatgccaatgcaagggccctgtgacagtgttgaatgcactagggtagatcatggcaaacgcacccttgcgtgcacttagcattgcgagttccggaaacctcatgtcatagcatatacctacgccaaacttaccatatttcgtgtcaatggtagtagacttctctccagggctcaaggtttcactttcatggaacgatataccgttaggaatgtctacatcgaaaagatggaccttccgatgcttgtcaatcaacttgccatcctcgttgaaaattatagaggtgttgtagattttgtctgtctttggatccaattccggaattgttcctcctaccaagatgattttaaacttattggctaaattagacagaaattgaactgacgtcgaaggctctttcggattgataacttctgaatactttctaaactgatcagtggagtacggagaattgaagcattctggcaatacgaccaacttggtatccggctgttccttcatagccctttcaatgaacgttgcagccctttgaagattggccattttgtcaggactcgagcctgacagttggaccaacgcaactttaattttttgtgaaagaatcttcgaagcactcatactggcgatcttcacgccctcctgctactacaaaagctgtgtttttacaagaatcaaattaagttagcaagatatcatacaacattattgataattttaatatcgtgttcgtacctgatgacgtatctgtgcattgataaggcccgcatggtttcagaaagcagagcgggacgattccaaattagtggccttgtgctttgcatgtcaattgtgttaccttcagctcgtggatttgttttatcaatacacagtctacagtcaagaatttttttttatcaatttgtgcgttcgagcgtataaaatagccgctgtagctacttaagttcctgttcagcgatagtttttttccatcacacgtactatggcaccaactttgtactattccttccccgtttactcaattcttgaagccaatttgtacaattccccattagagtcaaataaaaggatgcctcacggaggtatgttacccgcgctatttcacatggctcattgaattagaggtggaatttggtgtaccctcccctcctcatctgatgaagtagtgatccgacaattcttaaaagttgtagacattactcttaccaccaactaagttgtatttatattgctacccttatccttttatatctaactagcgcttataaggttggggcaatactaaaactgtgatcttattcagctcattaaatacgtggcagtacgtaccctattagaaacaataggaaacaacagagtcggaagaagccaaatgccagatttgaagtccaagaccttgtcaagccaatctttgggagcggctattcctccagaaattgtgtaccaaatacttacataccagtttagggatttgttaagaaatgaccatccaggtacggcagaaaagtttaacgaaaacttaactacatttgtcaaaagtaatttaactgttaataagacattctcccatatttgtcaagttctcatttatagatattgtaatttaactaccgcaaagagatttcacggtcttttacagactttaaagggaaatagatgcctttgcaataagattgaagtagccgatttccaagaattaacgtctattggactggggaggtccagtgagatgaataaaatgattaaaaatctaactaacgaaactcttcttgagtttctaatgctcacaaaagcaaacttaagggaattcttagcatgtgaaaatattcaagacgatttagacgataatatcataaagtatattctatctccaggaaaagtcttgagtgtagtggatttctgtggctgttcaggcaccactttcacagaaagttttattaaggccctggataaatactaccctaataaatcgattgatcagtaccggctggaacctattcaacaaaattatcagattacctgcttaggcctaaatgattgtattgatctaccatcacacgtcctttggaagatcttaaaaatgttaccagaactacaaaaacttgatttatctcatacctccattgatgatagtaccttatatcacggcatacctcactggaaaaatttaactcatctttccctcgctacttgtcttcaagttactccaagagcggttctggagttttttagtcatcacccaacaattacagaccctgacaacacttctacattagaatggctgaatgttagtgtcattgcccattcctcatcttggaatgaggtgcacacaatgtttttactaaaaaaactttgtcaacatggccataacaaaactttgcaatatctaaatatcggcggtttaccgcttcatgttgcaccttctttcggcgaggaccctattagcgaatccacttattattaccaatgccgcgatagcttacagttcataaagtggaattttccgaagttaaaaagtttgagtataaaaggtaatagtatcccgatatctacgctcgtagaatttttgacaccaattgatcaagaccatcctaattgtgctcaaaaattgaagtttttgaatatttctggtaactcttatgtgaataaatggactattcaggactcattattgtacacttgttctccaagtttagtcgcgttagaagtttcctttgactcgtggcaacagattgaaaaactaaatgatagacatgaaattattgcatacagatataaaaacccaaattcggtaattaaagatatttcaacagcagaacaagtaaagtggaaatgttacattgattcttcttatggtaggagatattggttatataagactgatcctttcctgaatcgtgatgacttggattctaagtcaaatttaactaggtatgattttgagggtcacaaaatcatagaaattataaaccagccggatttcctaaagtttgcccaaagtaaaatcatgcttggatgtggtctagttcctcaaagtggtattagacgtaaactatgttacagagatttaaagccaccagtttctcaattcttaaatagaaaaggtgcgatcagccttggtgatactccactaccaataattaccccaacattacctcgtggtgggtggagaatcatccataatgaggacgacaacaacagtcatgtggaagatagccaaaatcacgtgaatgccatcccaagaaggaattctctgttgagcagacccactttaagaagcaacaatggttcttcctctgccaacccctttgctatcaatgtttctcctgcatctcaaatcagggatggtttgtactgggataggtcggtccatgatttacgtgagctatcattgcaagaacaaagaattcaggagttagctgatgagcagcaggaactaagaacaatcgcaaactttgaagagactgacgacgaatatttgcacgatcccgacttgcaacggagaaggtcccaacttcacttatttgaaagttcgcgctcacgttcaggaaataaaacaagaccaagtttaactggtgaacactcgtcctcggcatcgtttctatccttctcccacttcaaccaccttcacaagcgtaagaattattatttcacgcatcccgatgaatttgtctatgatccaaaggatcctctgacgactcaaagatatagattacattttgaaatagtcaacgaatatcaagtttttgggtgcattgagcgtggaatgtatagatactacagtttaaaagcatagatatttttctctttacttccttacccttcctccgctctcgtcttgtgtcttgtatatgatttctatatatggtaaaatattgcatacatcgtctaccatttagccagacttttcggaaacgaatttaatgattgcagcaaattcccttcccctatcaactgattgaagaatgcctcgaaacgcaatgtgatttttaagttttccatttttttttttttcataagggaagcctctctcctccgaaaaaggtaaacattgcgaaaaatgatccaaaagagagaataaaaaaacaattagaaaatgatttactcatccgcttactagagaggccaaaccggatagtcctgacgctaataagagtaggattaagttcattgtggtgtgtttttttattgcgcgtaagcgatacctgcaaaattcattataattttcaatcaccttccatcaattatcaataccccatactaagaacaggcaattggtttaggaaggaaaataataaagatatccaaaaacaactggaagctttccagtcgcgacctctgttttgttcgaacttctagttaacaaaagaaagaccattcaattgcttttttaatattcattattgacgatttttatttctaggcgattaccggtatacttttcattcttttgataagataataaatccaattacattcgcttattttaattcaatttagactataactttctcttaactctaggagtttctttcttgaatcgaagcatttttgacaatacccaatatcctctttctacttgagaattttttcgattctacatgaagtatgatacaatcagacgaagataatttggactcttctgaaacgacagcatcaacttcatatagtggtacttcctctgtatcatccagactacaactaagaacatccttgttttttgaaaatcttaatggagcacatgggaaccccgatgcggagacagagatggctactgttgcctatgaaaccacaagtagaggtcaaggatttgctgtatacatcaacaatgaaaggttttctcaaataatgggagcatccacaagctctagctctagtagcaactcgtcctctattacacaatttcacgatacccaagataataatataccaagcaacactactgtaaggccaacttcacttcgacgagacaacgaggataccgtaccgttaaggaacgtaactccttcacaaaacgcggcggtacggccagaaagagcagtgaattcaccatcttcgcagagattaagttgcgcactgacaatatcaacttcagttcttatgggagaagatgttgaaggaagccctatagagcaagagcatagtagggtcgtatcttcattatactcatctttggcgaatcgcgggaacgacgagtcaaagaatggaacacctccacgtcctacctcaattgaacctaatgaaacaacggaacactcatttttctcataccattacgatgacaccttagaaccagatgttgaagaggcagtgaggctaacgaagaataaaacttctaatgttaattttataagctcaactggcagtaaaggtgaaggcgagaccgaggatgaagtcatagatcaatacgaacctgtgaatgaatcaaaatttataccgcacaaactaaaaattccagagaaggctggatcaataaagtcgtcgacaagtgatgattcgcattcgccaggtgcgccaggtacgtcggcaaggaagattaaaattcctcagagtccatcgttaattggtaacatattgattccttcacacaatagtgacagtagtaacgaaagttctcctaaagaccatatagggcataataatgaagaaaaattcagttcaaaatctacgcgcaagccctccacatccctagaagaagaaggtccaccaattggactaccttcaattcccgtattaagaagtgtgtccggaccaagcaaatggacgaagacacctttacgcttagaatctggaaattcaactaagtctgatccattttcacgctatgaaggacacaagacgccctctccattgaccaagatgaacaagaagaaaaataaaacgttgccagaacatggacaacccctcgtgctagctccaattaaatctcaaagctcggagtcagacacgggacagaactccattatagaaaagccagctcgaagcatacgacgaaagcaacaagaaaaaactgataataggaaagaagacaggcacgatgctgaaaatatagacctggaggcgagaatgccaattcaacatatcgataccgcttccattcattcgtttgattcaggtcaaaatggattcagggacgtttacagcatcgaaaacatcattgtgatcctcctatgttgtagtatagtgccgccattattttttattattggctgcagctcaagaaggaaattagtttcagactatagattaatgaggttgcttatgaataaagaacaccgagcggctttgctgcaaggattcatatgggacgttgatttaaggtggttccggatgttttgtctgatcttaggggctgccgaaacagtgattgtgatggccggtattgctattggatttggtgtgggtataacacgtgaataagaaactgtatcattcatcaaataggataaaaaataaaaaactgttctgtctcgttaaagtcatatatataaataggggattttcattaatttatatatatagatatacttgtgtacatgtacccgtaagtatcaaaagaaacgtgcataaggacatggcctaaattaatatttccgagatacttccttaagcggtaactttcttttcaatcaagtcgaatagagtaacaatatcggcagagaattttctgataccttcggacaatttttcagtggccatagcgtcttcattcaagtcgaatctgaatttagattcgtcgctgatgtaagaaatcttgtcgccggcttccttcttagcggagacagggtccaaaactcttgggaaaggttcagtactgttcatcaacttgtccaataaagctggagaaattgttagatagtcaacaccagccaagtttttgatttcgtcagtgcttctgaaagaagcacccataacaatagtcttgtaaccgtacttcttgtagtagttgtagattttcttgacggaaataacacctgggtcggcttcacccttgtaatctttaccagtgctggatttgtaccagtctagaattctaccaacaaatggggaaatcaaagtaacttgggcctcggcacaggcaactgcttgaacgaaggagaataatagagtcaaattacagtggataccgtccttttcttccaattctttggcagcttgaataccttcccaagtggaagcaattttaataaggactctttccttggagacaccttcttgttcaaacaatttaatgatatgtctagccttttcaatggtagcttgagtgtcaaaagacaatctagcatcaacttcggtggagactctgcctggaacaatctttaagatctccttaccgaattcgactaacaatctgtccacagcattttcgacttgttcttcggtggtcttaccatgcttcttaccgtattccacggcaacatcgatcaacttggcgtaagttggttgcttggcagcagccaagatcaatgatgggttagttgtggagtcttgaggttgaaacttggcaatagagccgaaatcaccagtgtcggcaacaacgacagtgccggaggctttcaattgttctagagagttgttagcaaccttttgtttcttttgagctggttcagacattatgtacacgtatatgtgacgagttcgagaagtattttactatcgtactaaattttacctgaaaaattatatactcgagaaagaggaagccaagaattgagaaaaaagaaaaacccgcgagtaaggaaattaaatacaggtgtacacatacacgcacacatatatatatatatatatatgtatatgtgtatataggaagcgcgcgcatgttagtatatacgattcgttggaaaggggccgtccaccaaacgtgacttgacgagttgacaaattgacctcaatatggctcagtcagtaatttttagttccgctttattcccgccatctttcaggccacgagggtagctcataacgccgcgctaatgccgctgcgtcacagcaaccagtagctcagccaaaaccgaaagagaaatcgtagctgtcccgatgaggacttatacacttgtcaccatctaaataaattatttattcgcgtttcggttcttgttttcgatttaattagattgttcattgaatcataataaatatgtaaaaaatatatatatttgaagctgcttcagaaaaacagggcttcctagtgtacagatgtatgtcggatgaaaaaaaaaaaatcttaaatgtgaaattgggtcaattcaattgactatgacttgatgttgcaaaaattccaagagaaaaagtttccagcacttgatattattttcctctttattggttttctggtctcaactttctgacttccttaccaaccttccagatttccatgtttctgatggtgtctaattccttttctagcttttctctgtagtcaggttgagagttgaattccaaagatctcttggtttcggtaccgttcttggtagattcgtacaagtcttggaaaacaggcttcaaagcattcttgaagattgggtaccagtccaaagcacctcttctggcggtggtggaacaagcatcgtacatgtaatccataccgtacttaccgatcaatgggtatagagattgggtagcttcttcgacggtttcgttgaaagcttcagatggggagtgaccgttttctctcaagacgtcgtattgagccaagaacataccgtggataccacccattaaacaacctctttcaccgtacaagtcagagttgacttctctttcgaaagtggtttggtaaacgtaaccggaaccaatggcaacggccaaagcttgggccttttcgtgagccttaccggtgacatcgttccagacggcgtaagaagagttaataccacgaccttccttgaacaaagatctgacagttctaccggaaccctttggagcaaccaagataacatctaagtcctttggtggttcaacgtgagtcaagtccttgaagactggggagaaaccgtgggagaagtacaaagtcttacccttggtcaacaatggcttgatagcaggccaggtttctgattgagcggcatcggacaacaagttcataacgtaactacctctcttgatagcatcttcaacagtgaacaagttcttgcctggaacccaaccgtcttcgatggcagccttccaagaagcaccatctttacggacaccaatgataacgttcaaaccgttgtctctcaagttcaaaccttgaccgtaaccttgggaaccgtaaccgatcaaagcaaaagtgtcgttcttgaagtagtccaacaacttttctcttggccagtcagctctttcgtagacggtttcaacagtaccaccgaagttgatttgcttcaaaccacgggtagtgatcattggcttaacgaaacgggcagctggtctgctgtaagcagcagcacgggtggccaaagcaaaggttctcttagcagtgatgacacgggagttgcagatcaatctggcggcttgagttctcaacatgttttattttttacttatattgctggtagggtaaaaaaatataactcctaggaataggttgtctatatgtttttgtcttgcttctataattgtaacaaacaaggaaagggaaaatactgggtgtaaaagccattgagtcaagttaggtcatcccttttatacaaaatttttcaattttttttccaagattcttgtacgattaattattttttttttgcgtcctacagcgtgatgaaaatttcgcctgctgcaagatgagcgggaacgggcgaaatgtgcacgcgcacaacttacgaaacgcggatgagtcactgacagccaccgcagaggttctgactcctactgagctctattggaggtggcagaaccggtaccggaggagaccgctataaccggtttgaatttattgtcacagtgtcacatcagcggcaactcagaagtttgacagcaagcaagttcatcattcgaactagccttattgttttagttcagtgacagcgaactgccgtactcgatgctttatttctcacggtagagcggaagaacagataggggcagcgtgagaagagttagaaagtaaatttttatcacgtctgaagtattcttattcataggaaattttgcaaggttttttagctcaataacgggctaagttatataaggtgttcacgcgattttcttgttatgtatacctcttctctgaggaatggtactactgtcctgatgtaggctccttaaattggtgggcaagaataacttatcgatattttgtatattggtcttggagttcaccacgtaatgcctgtttaagaccatcagttaactctagtattatttggtcttggctactggccgtttgctattattcaagtcttttgtgccttcccgtcgggtaagggagttatttagggatacagaatctaacgaaaactaaatctcaatgattaactccatttaatccttttttgaaaggcaaaagaggtcccttgttcacttacaacgttcttagccaaattcgcttatcacttactacttcacgatatacagaagtaaaaacatataaaaagatgtctgtttgtttagccatcacaaaaggtatcgcagtttcttctataggcctctactctggtcttttggcttccgcttcattgattacatctactactccactagaggttttaacaggatcccttactcccactttaaccactttgaaaaatgcggccaccgccttgggagcgtttgcgtcaactttcttttgtgtgagctttttcggcgctcctccctcattgagacacccctacttactctatggtatgcttgtagctccattatcttcatttgttctaggatgtgcctccaactatcagtctagaaagtacagtaaagtctctaaggaatcttctttatttcccgaagacagcaaactcgctgcttccgaactgagcgattctattattgatttaggtgaagacaaccatgcttcagaaaatacacctcgagacgggaagcctgcagcaaccacagtatcaaagccggcagaggcattgcacaccggtcccccaatccatactaaaaatctaattgcagcaactgctattgctattgttggctttgtacaagccgttattggcgtttatggggaaggacaatttatctagtgtttctcgttcacgtatttatctctacaagaatttgtagctgcctgaactcggctcctctctctctccaaaaataaagtgtgtagtaatttgcagtttttttatatattcctacgagttttcaaacgttcaaaagacagtatgttcaaaaattgtgcatacacacacgtatgcacatatatacataataatacactgtaataagcacatttgtaggtgctcttgcacttggtttattactgtcactgacttttctcacccggccgagagtcgtgcgaaaattcgcatgttaaagtgagaaaatagagaaaacaacacagctgaaaaaagtattggtaacagttcaatacgtgatcaaatatacagcacgtcgcgcagaaccagacgaagcggagaatattctacattgacagtgcatgatgcctgatgacaattcaaactcgtccactcaaaactcaagcgcattatacaaggacctgaggaaagaatatgaatctcttttcactttaaaggaagattctgggttagagatttcaccaatattcaatgtccttccacctaaaaaggattatcctgactactacgcagtgatcaagaaccctgtatctttcaatactttaaaaaagcgtattccacattatacagatgctcaacagtttatgaacgatgttgtccagattccatggaatgccaagacttacaatacaagagattcaggaatttataaatacgccttagtccttgagaaatatttaaaggacacaatctatccaaatttaaaagaaaaatatcctcaattagtgtatcctgatttgggtcctctacccgatgaaccaggttatgaagagtttcaacagaaattaagagaaaaagctgaggaagtagcgagagctaatgcagccagagccgagtcgagctcttcaatgaattcaacagaagcagccagaagattaagaaagactcgtacttccgtcaaaagagaatcagaaccaggaaccgatacaaataatgatgaggactatgaggcgacggatatggatatcgataaccctaaggatgctgattttcctgatttgataagaaagccactaataaatattaatccatatactcggaaaccattaagagacaacaggtccactactccatctcactcaggcacccctcagccgttaggcccaaggcatagacaggtatccagaactcaggtaaagcgtgggagacccccaatcatcgacttaccgtatattcaaagaatgaaaaatgttatgaaagtactaaaaaaagaggtgctagatagtggaattggtctaactgatctttttgaaagattgcccgatagacacagagatgcaaattactacatcatgattgctaatccaattagtcttcaagacataaataaaaaggtaaagactcgtcgttataaaacgttccaggagttccagaatgattttaatcttatgttaaccaactttagaatttcgcacagaggtgatcctgaaagcataaaaatttcaaatatcttagaaaagacctttactagtctggcaagattcgaactatccaaacctgatagaagtttcattccagaaggcgagctaagataccctctagatgaagtcattgtaaataatatatcataccacgtgggagattgggcacttcttcgaaatcaaaatgatcctcaaaaacctatagtgggccaaatattcaggctatggaagacaccagatgggaaacaatggttaaacgcttgttggtattacagacccgaacaaactgtgcatagagtggatagattgttttacaaaaacgaagttatgaaaacaggtcagtaccgtgatcatttagtgtcaaacttagttgggaaatgctatgtgattcactttactagatatcaacgtggtaatcccgatatgaaattggagggtcccttgttcgtttgcgaattccgttataatgaatccgataaaatttttaacaagattagaacctggaaggcttgcttaccagaggaaattcgtgatttggacgaagctaccattccggtaaatggtagaaagttcttcaaatatccttcccccataagacatctactaccagctaatgcaacgccgcatgatcgcgttcctgaaccaacgatgggatccccggacgcgccaccattggtcggtgccgtttatatgagacctaaaatgcagcgtgacgatttgggggaatatgcaacctctgatgactgtcccaggtatattatcagacccaacgattctcccgaagagggacaagtggatatagaaacaggtacgatcaccacaaacacgccaacagcaaatgctcttcctaaaacaggatactcaagtagtaaactatccagtttaagatataacaggtcatctatgtctttagaaaaccaaaatgctattggccagcaacaaataccactgtcaagagttggttcccctggcgcgggaggcccgcttactgtacaaggtttaaagcaacaccaattgcaaaggttacaacagcagcaacatcaataccaacaacagaaaagatcccaagcatcacgttataatatcccaacaataatcgatgatttaacatcgcaggcatcaagaggtaatttgggtaatataatgatcgatgcagcctcctcgtttgtcttacctatctctataaccaaaaacgtagatgttttgcagcgtactgatctgcacagccaaaccaagagatctggaagagaagagatgtttccatggaaaaaaacaaagggtgaaatattatggttcagaggacctagtgtgatagtaaatgaacgaataataaattcaggtgacccacacctaagcctgccactgaataggtggtttaccactaacaagaaaagaaaactagaatacgaagaagttgaagaaaccatggaagatgtgactggaaaggacaaagatgatgatggcttagaaccggatgttgaaaatgagaaagagtccttgccaggcccatttgtccttggattaagaccctcggctaagttcacggcgcacagactctctatgctgcggcctccttcgtcgtcttcatgatcacctttattgtaaaagcaatggcagcataatatcttcccattgcgcattaccctccgcgagcagagtcaaacttcaaacaaagcaggaaaatgaaataaaacagaagttattatatagaagaaagtcatctatagatatattatcgttgtattaatagtagccatataaaacaattatacttcatcaccaacctctcaaaatttcttccccaaggaccaaagcttttccagtaagttgctacaactaaagtgaaataaactatccgaattatataaaagatgcctgactatgacaattacactacgccattgtcttctagatatgcctccaaggaaatgtcagcaacgttttctttgagaaacagattttccacatggagaaaactatggttaaatttggctattgctgagaaggaattgggcttaactgttgttacagatgaagcaattgagcaaatgcgcaaacacgtcgaaatcactgatgatgaaatcgcaaaagcttctgctcaagaagccattgtaagacatgatgttatggcacatgttcatacatttggtgaaacttgtccggctgctgcgggtatcattcacttaggtgctacttcctgtttcgttacagacaatgctgatctaatctttattagggacgcctacgatattattattccaaaacttgttaacgtcatcaacagattggctaagtttgctatggaatacaaggatttgcctgtattgggttggactcactttcaaccagcacaattaacgaccttgggtaagagagctactttatggatacaagagctattgtgggatttgagaaactttgaaagagctagaaacgatatcggtctacgtggtgttaagggtactactggtactcaggcatcattcttggccttattccatggtaatcatgataaagttgaagcccttgacgaaagagtaactgaattattaggtttcgataaggtatatccagtcactggtcaaacctactcaagaaaaattgacattgacgtgttggctcctttgtcttcttttgctgctactgcacacaaaatggctactgacataagattattagccaacctgaaggaagttgaggaaccttttgagaaatcacaaatcggatcctctgctatggcttacaagagaaacccaatgcgttgtgagagagtgtgctccttggctagacacttaggttccttgtttagtgacgccgttcaaactgcatccgttcaatggttcgaaagaactctggatgattctgctattagaagaatttctttaccaagtgcatttttaaccgcagatattctattatctactttgttgaacatctcatccggtttagttgtgtatccaaaggttatcgaaaggagaattaagggtgaactaccttttatggctactgaaaatatcatcatggctatggtagaaaagaatgcctccagacaagaagtacatgagcgtattagagtgctctctcatcaagccgcagcagtagtcaaggaagaaggtggggaaaatgatttaattgaacgagtaaagagggatgaatttttcaagcctatctgggaagaattagattctttactggaaccatccacttttgttggtagagctccacaacaagttgagaaatttgttcaaaaagacgttaacaatgctttacaacctttccaaaagtacctaaacgatgaacaagtcaagttaaatgtttagaagcctttacatgtacaaataatatgtttattaccctattatatgttactaatgaaaaaaataacaattctttatttatgtacaatgcaagtagaattccctaaatagaagttaactatttttattttactgggatatatttttcatcttcttccttcatactcctttcatttttcttgtttttttggcttacggattttggcaatgtttatactttagaaaaaaaggaaactcataatgctggcatacttgaaaaaccatacggaaagatcgtagtttatttttgtaataagacactgaagtcagctgtttgaaagagtatattgaattgatggttttacctattagggatagtaatcataatttaaaaatatgaaacggttcttactcagtcgaagacagagacaccttcgtatgatttgctttcacaatataagtctctttagagctaatggtgactccaaattgatcaaggaatatggtgatggatttataccatgtttctttatcttggaatccataagaggggagctgctttatgtgagcgaggtacaatcaggttctttgcgtaaactctcttttcaggaattaccaaaactaactggtgcatctactatgattgtcctaaaattggtaggactagttccgagtgatattttgtgtaccataagttcagataaaaatggtatcattgacgataaatggtgcgttttatgtacctacacgatagatcttaacaagttacaacccataaatgaagacacagttctaattacaggcaccaacgcaccagtacttgatttaatagatggatcctacacattggctgcagaaaaaattaagccactaaagggccttgttagttctcacaaaaggaatataagtcaagtcaagatcaaattttcattggcatatagctctttactaaaattaaacaaactattggagtattcttcccaagtccatgaggaaatcaatgaaatttccagcaaaatagaagatgactttttgtcactcaagaatcaaaatcattggtatatgagaacagtacagaagtccatagaaacgctagaaaaggaagtcctacaaaggaaaaaaagcaagaaaaatatagaaatggcgcaactcgagagtaatgatactatcaaccattctaaaacagaactgtctctgatgtcgcaggacgagtctataaatgatgactatggaagcatatattctagatttgtgcaaataaaagataggttggaccaactgaggtttaagaaactgtatcagctgatagggatcttccattcaacggatttatttaattcagatagaggctatatttactttgaaaaaccttctagcgtaaatgatgttattaataggctcaagctaaaacctttgaatatagagatattacttagacaagccggcgaatccacaaagcacagagaatatgtaaacagccagttgggttattaccttttatttctccatttgacagccatccaaattttcaaggctcctttaccctatagactaatgtattatggtagtacatcagtgatcgacagtcaatatccgttgtatttcactgatcaaatgatttctaagcatcaagcaaagctgattaaagccatacattattttaatgctgatatattgcaatttaaacagattctggagaattaccgtccaacatagactgaaaatcaaaaatctcttttggactgccatttaatcttttccatgtgtgtatattgttctcatttacattaatttcataaatacggatacgtctttctgtacctccatagccagcataaccaccttctccacctccaccgccatagcatagccagattttgttcggcgtagagtcatctcgaagacagtaatcgttacaatggtcatgtccgcaactgacgacatccacacttaacctatccaaagttgttatcccctcagaattatacttaggtgcagtaacaccttctttgtacattccaatgaggggatttttctctccgggatgtgtcttggattcaatattcaagtattctggcagtgggatgtgaaaaaatgccattgaaagacctgttttgaacttcaagttcacatcatgataatcttcaatgtatttccactgtgattccttaatccaatcatatccaggataaattttaccaaccgtagaatatttatgtgagtccagaaaataaagtgtacctactgggacttctgtatcattgttcgaaaaaatctgataaatataattaccaacgccaaacgtattatcgtgtgtatcatggggactaaacttgaaaagggaatatggtagtactgaagctatttcggataactgccagcgcgttaagcttccctcgtcgtcgtgatttccccataccattgcccacggaatttttcttgcaatgacgggtgctaccgcctttaataatacggtttcagagtcttgaatagatctatcacccatgatttggtcaccagtaaaaacaaccaactgcggtttttcaatgtcaagaacttgttgaacgaaagtttccgtttttggatctgccttgcaagcttcatgctttggatactcatcgatacattcagactcccccacacccaagtggagatccgccaactgaacaattttgaactttccttcatcagtttcttgcagccgttgagctcctgtgtctacaggacgagtaccaacgaatttgtaagtcaaataagcaggttcgctgtagcggtattttactaagggaaattctttttgaagagtccaatttgctatcggctggatgcaatcaacaccaaagagaatgttaatatcgcttatgtagctccttttctgcaatagttctatgctaataggctcgaatgtgatggatacatccataaagggtagcgatttgtctttaggatatttggaaattccagttactgcctcaacatttagcttttctaggttggatccaaagtagtccaccaaagcagggtataacacatcatagtaaaggtattctgactttccaaaccacctgcgtccaaaggaacctctcaagtctttatgaattcttttcctttgtaagtattggtgcccatcagttaaagttgatttaagttcatgccgattaaaacatccttcataaaaacgaccaatatgaaaacattcgtcatagcctatatttacaactagcttatcgtcatttgagaatccctctagacctttattttggaaccatagattatcaacgtgtgatatcgggagtgcaaggtcgaaaccaatgtgctcttcaactcttggcgcctgtaggaagtaaaatagggcaatcactacaaaaactaccaagtataataggtacctttgatacagcctcggtaaccggatcatgttaagatttttaaccacggtgctggtcttcgatacttaagtataaaacttgtatcagaggtatctgcgatctaaaaagattaatttttgaaaaagatcaacactaaaccatttgaaattcaaaaagcacctaaggcaaaatataaatctaaatatacgtaaaatggaaacactttctgcgcagctttatacaagttagccttctagcttatgaaatagaaatgaaatataactgagcaagtcctatatacaatactattaatgatcttcttgtccatgagactgttcatggtgccttttagagacttcttcatcacttatctgaggcctgtggccacccgttctcaataaaccaccggcagtatcttcaactggaaatcttgcactgggtcttacgcaatggggcttgcgtaactgttcaaaatccatgattttagttttccctcccccttttaaagtaatctttggattctcgcccaacttttcctccacttcttttatattttgggtgcgttctttactattattattattattattattactaactgccattatagtttctttatgctgtcctcaccatgcctttcgttatcaggctagcattaaaagccttttaaggtgtaaagctttcgccgcgatggctttaaacagtagaaaatattcatatttacacacatgcataaagagagaccacttaataaagctagtatgataagatcaccggtagacgaaatatacatggaacagacacaaacagcagagggcactgacttactaattggtgacgaaaagaccaacgatttaccttttgtgcagttatttctggaggaaataggatgcactcaatacctggatagctttattcagtgcaaccttgtcacagaagaagaaattaagtatctcgacaaggatatcctcattgctttgggtgtaaacaaaataggagacagactcaaaattttaaggaagtcaaaatcgttccagagagataaacggattgaacaggtgaatagattgaaaaacctgatggaaaaagtaagctctctatccactgctacgctatcgatgaattcagaattgattcctgaaaagcactgtgttatatttatcttaaacgatggttccgctaagaaagttaatgtaaatggttgctttaatgcagattctattaagaaaaggctaatcagaagattgccacatgaattattagccacaaactccaatggagaagtaactaaaatggtccaagattatgatgtgtttgtcttagattataccaagaacgtactgcatttgctatatgacgtggaattagtcactatttgccacgcaaatgatcgtgttgagaaaaataggctaatttttgtttccaaagaccaaacaccaagtgataaagctatatccacatccaaaaaactatatctaagaacgttgagtgcattgagccaggttgggccatcctcgtcaaatttgttggcacagaacaaggggatttcgcataacaatgctgaagggaaactccggatcgacaacacagaaaaggacagaattagacagatttttaatcagaggcctcctagcgaatttatttctaccaatttggccggatattttcctcatacagacatgaagcggttgcaaaagacgatgagagagtcatttcgccattcagcaaggctaagcattgctcaaagaagacctttaagtgcagaatcaaataatatcggtgacatactattgaaacactcaaacgctgttgatatggccctattacaaggattagatcagacaagattaagcagtaaacttgacacaactaaaattccgaagcttgcccataaaaggccagaagataatgatgccatatctaaccagttagaactattaagtgtagagtctggtgaagaagaagatcacgatttctttggggaggacagtgacattgtttcattaccgacgaaaattgccacgcccaagaattggttaaaaggtgcttgcattggatcaggcagttttgggagtgtttacttgggcatgaatgctcacactggtgaactaatggcagtaaagcaagtggagataaaaaataataacattggtgttcccacagacaacaataaacaagccaattctgatgagaataatgagcaggaggaacaacaagagaaaatagaagatgttggggcggtaagtcatccaaaaaccaatcaaaatattcacagaaagatggttgatgctttacagcatgaaatgaatttattgaaggagttacatcatgagaacattgttacttattatggtgcttctcaagaaggcggaaatttaaatatttttcttgaatacgttcctgggggttcggtttcctccatgctgaataattacggtccatttgaggaatcactgattactaatttcactaggcaaatactgattggggttgcgtatttgcataagaagaacattattcacagagatatcaagggtgcaaatattttgattgatatcaaaggttgcgtaaaaattactgattttggtatttcaaaaaaattatcacctttgaataaaaaacaaaataagagagcttctttgcaaggttccgtattctggatgtcaccagaggtggtcaaacagaccgctactactgctaaagcggatatatggtctacaggatgtgttgtcattgaaatgtttaccggtaagcatcctttcccagatttttctcaaatgcaagcgatcttcaaaataggcacaaacacgacccccgagataccttcctgggctacgtcagaaggaaagaatttcttaagaaaggcatttgagttggattatcaatacaggcctagtgcccttgaattgctgcagcatccatggctggatgcacacataatttgaaaaagggctacttattaattctttttatggcactaaagtgctctggccgattttttatcaaataatacatatatatcatatttagtgacatttattgaatatatctgctatttaccggtttttttttttcaattacgctgattaagtaatcataaatcacaattgtgaaaaaaagaccaaactagatgacggtatttgattctcatacccctggaataaaatcaagtaagataattctgataaaaaaatccgaccgcacagatggaagcacgaagaaacaggcctttctttgcgaggtgatatcaaaccattgatatcttctcaataacctgctctaggaaaaggaggtagatagacaaaagcaaggaaataatccatagagtttcattcacatgaataatctgttaccaatttttctcataagataaagccatctatcaaaaatgatattgaaatatttgaaaaatgcttgtttttatggggaccacaattcgcctgtacctctagaagcgtaaactgttttattgaagttagtcctgataatttctctaccgttttcgctttcttccttagtgccattttttagcatcatattattgaatttttcactttctctaaatgatttatcattcatgtccttggacaagattgaatctacatcaacaattgaacaggaaggaatattgcattgcatggccatttcccggatttgaggatcttcactaattaaaaaccaatgtagcccctcatttccttctaggtagcatttgtaaatacaacttttcaacaaattctttaatctcttaggcaattttgcaatattaatctttccagaactatcattatgttccattacatctgaccataaaataatgtctaaaacttcgggaaattcgataaaaactttcaaattagcaaatttagaatcatctaatctatcgataaacttcaaggattctcgagctgcaaaacttttacgcctttgttgaaggaaatccaattcatttaatgtgaatgttggaatataaaagttcaaagtcacagcttctgtacagtccgagcaccacctcttgatgttgcctagacccttttcaaaagctgaagcatctataatgaaattatattgtgtcattaacctgctttttgaggagaccaaaattggaaagaaagaaggtgcttatatttcacgaatgaatgatattagcaggtgtaatattcttctataacaccactacactaacttttaaattaaagcgctcttcattgttacttcaaatcaatttctgagattatgaaagtcgtcacgttttacgaaggtattgaatttttcaggttcttttggaaaatagtagtatacatcagtttattaacgatgagatggtattattacttgcaccttttgtaaagataactagtattcataaagtccataagctacaatatgcctcaaaaaccacttaaagttactaagaaagccaaggacccccgtagggtcacaaagaaacaaaaaaatttgagaaaagctgccccattgcaattgaaatcaaaaaagaaatctttgcaacatctgaagaaattgaaaaagagctcttcccttaccgaaaccactgaaagattagttgcgagtaaagtcgggcatttggagttgttgagaggtactagaaaggagttggaaaaaggtaagaagaactctaaatgatttcaagtgaataagattcgcccatcattgaaaggtatttattttcgggtaaggactatctaggtacatctcatcaaattttttatagtccaatttgatcctagtgtttgtatattagctttgtaacttctaagttatccaatagaaaaaatgcgttgcttttttgtttcccgcgagaaatttaacaatatggtgaattaagtgttgatgccacagtttgtaaaaaaaatcgacacaggtttgctatttaagcagacgtaagtgttgtaaaattatgtattcccagtttggccagaagaggagtaaatatcgcatatttatagaataagtacaacatcaaataatgtctgcctttgttactaaagctgaagagatgatcaaatctcatccatatttccagttatccgccagctggtgccccgactgcgtctatgctaattccatttggaataagttgaatgtacaggacaaagttttcgtttttgatattggttcacttccaagaaacgaacaggaaaaatggagaattgcgttccaaaaagttgttggtagcagaaacttaccaacgatagttgtcaatggtaaattctggggtactgagagtcaattgcatagatttgaagcaaaaggcactcttgaggaggaattgactaaaatcgggcttctgccttgaacaggttggatatttttatattaatatgtacgtaatatgtctggaatatttcgaaaacacgggtaagcaaataaaggcctcccattcttccttctatagaagcgtgagcgcttcctcattaacctcttctttagcagtccatatgtaaagatatccaagagattgttcccataaaacgttgacgctaagcaccttcatcagtgtcatatagaaagacagcgctccaagcaccatttccgttttctttcattttggaatggttaaataatgactatctatgatagtttaaaaataccaatatcatagaagatgaaagtcaaatatatgactaaaaatttaggtgaaaaatgtaatttaatgtatacctttcatttacaaaatgtcaaagactttacacagtctccgcgtcaaattatcacatgaatgtacaatcacttttctgactgctctaagctatgtcattgcgatgcagaatttcactgccgcatagacaattttgtgtttcttttgacggtgaattcatactcatctgttccgtttatgcacatttacctcccacttcgctcttagcgattttatgtcacacaacaactttattcgtttatgccggactttcctacttatacataatggaaaacttaaaataattttaaaaggaaagtttctgccacatataactagttctcttttcttatatgcaattcggttgcatacttaaaagtaatcagaccgaatgaacatgtgcctttgcattacttcttttcaaaggacatctctttgcaagctaaccatctgaaaggccgatgaatggtcaaaggacgtcattcaaaacgcaaagggaatttccacattattttacgtaatgcttcgctgttacaaagacagaaacttgacaaatcaaggtcaactggatcgttgctcgaaagtcgccgtcagccatgcgttttactttcgtttgcaaaactctttctcttgtgtatcgtatttagcccgaaattagactataccaaaaaaaagaccaagattcttaagcttcatcaatcctttggaactgcaactattcttacaatctttcatttacatggctcaagaagtgttgctgctcaaaatttcattctatttcatgattatttacattaaacaagtatgatccgttattcttctcgcaaccggagtgctcgagaagtgccagtaagacgacaccctatttttcaagtccagcattggaagacttccaatgaacactcttatcattattctttatgcattacgtttcgcagtaatcctagaaccctaactttttctaaaattaccgtcaaaaatgacggacgcaacttttctcagaaattttttttttcatttctcttaaaaagttttctacgctggataaattgttctcttccctttgaaatatggagacgttcaaagtcaatttccacacatttaaggtgaacaaataaattataagataccacattaacaacaagtatgtggacgaggtgtggtaagatctccgctgaggttgattgaaaagtattgggtaaatttgtactttttgtctgctgctggtcgtttgtctttcgttttaaaattgcgctagacaagtaaacagggattgcttaagaatcaaagtagcttaactctaaagtattattttcctcagttgtgggcccatgtgttggagggaaggaatatattgaaatgtaaatgttcttaagttcggttgaacttggatattgttacaagagttctagtctttgataccatttttacgcaattacaaccgcattatttaccttttcatcttcagttttacggttcagtttattctgttacgaaagaactatggtgattcaaaggcgaagtgcgtaggattgtaactcctatatctttaggatacttacaattttgtactgttttcaagaccactgtaaccgataataaaccggaggacacattttaacccactatttttttcagaagatcagatgcgagagctcgaagcataagtataatactaacgtttcaaaacatagtaattaggtaaaaaatgactcgctcttccgttttagctgatgctttgaatgccattaataacgccgaaaagaccggtaaacgtcaggttctattgagaccttcttccaaggttatcatcaagtttttacaagttatgcaaaagcatggtatgttccaactatttttcaatattttcacatgtgtttcaatttctgcttatttttaaatgttaccacgaggtttgtccaagttcaatgttgcgcaactctaacgaagaaataattattgccattgttttttactccgggctgataactagatggtgtgatcgggcagtatactaatttatactggacaaagactcgtaaaagatgttctttgtgcttagtcccatactgttttttaagtgtccgggatatttaatcccatgtggaaatgcttcttacacggttatggattacacctcatgtgtagctactatatccattaccgtttacttttcctcaaaatctcactcttaaaattttcaatggcaaaattcttccgcacaacttagacaacattttcttgttttttatgaagtaagcaaaaatttcgaatcaacaacgctccatgagattcttcaatactaacatttactccttatttaggttacattggcgaattcgaatacattgacgaccacagatctggtaagattgtcgtccaactgaacggtagattgaacaaatgtggtgttatttccccaagatttaacgttaagattggtgacattgaaaaatggaccgccaacttattgccagccagacaattcggttacgttattttgactacttctgcgggtattatggaccatgaggaagctagaagaaagcacgtttccggtaaaatcttgggttttgtctattaagtaagtttttagtagtggtacatatataatattaattcttatatccgtcttttctctttggttattttctcagcttcagatattcaaggaaccgtatttttgcgtaatagcgaaaaattgtttatgttacataataagtgaaagctggaggagcatatgtatagaatcgaagagaaacctgaacaatttttcggtattagttactaaaaggctcacatatacatgacaaagaggagaaacctctttatggttggttcttccttcacaatagatcatttacctccagaaatatggctttgtatttctaagctggtcgggacgtctgacctgcataacttgtgtttaattaacagaagattgtatttgacaattacaagtgatgaaatttggaaaagaagatgctatgaccgatggataaatcgagaaagcttagatattttaactggtaatgattacgattctatacccgtctctcaatggtattcttactatttaagaagagcaaaatgggagaataaaattttttgtctattatgggggttaactgaagaaacaaatccccaacatttcagagagaaatatttgcatatcctccaatttagacattacaaactggctacatttctgcataggattataaaacaaggctacatacctgataaaagaccacttgatttaatcacgtatgcaaactatctgttgaaaaatgtgcgacataagtacgtatttcctttattttatcccacaaatgccgctgaattgaaaaatcttaataatatggcctcaagggatgctgaaatgatatatttaagattatctgccattgatacgtcttttgatgacttactagatgctagagaattcatattaaatggaatatgttccgatctactacaaaagtataaaaaaattgaagagtttttgaaattacgaccggtgactagggtttccaagttaatctcaatcagtactgactatctggactgcttcacacaacctcatgattcagtgggtcaaacaaatgatagggccacaggaagggagctacatagagaggatttcatgttactaagagtatattcccgagaaggacgaggttataaaactatcattctagcaataatacaggctatcactaagagatataacgttgattcatatcttgctcgagatcatttggtggtgtctgaaccagactttccagatggacgggcatttgttaccgtgaatgaggatttccagccatacatttttgataaagaggaccttttgagcgtttggtcgaacaacttccataacgcagaaaattttgaaagtacagttttaccagcattattagaaccaatatcgatacaacatcttctgacggagttctttcgagaactgctgcgatgcaagcccaggccatttgagggatatccaaacagagcacacggattacgcgatatgtttccatacggaaaagtggaagttcccagagatgtgacgatgtattttgcatttatatacgatcttttcgatggcatgtttgaatctggaatgacaagtttacggggccagatgttgagagatttactgaactacgttaacgctaataattttggtgatttgaatatcatcattggacaaaatgctcttaaggaaccaaatgactgctggtccaacaagagggattacgttcttcttgatgacaataataagattggatatttctatacggatattgaaactgaggatactttatgtgccttaaaccaatatgaagtggacggcaaagtttttataacaacaatagatatcttgggtgatataagagtacgcctggctgaaggactaacgccttttcagggagataatgataagttgtgggagagcttttcttccgttgttccacgaactgactggggactttttttcaaaggctatgacaaagaaaggcgtagaatgcaattaaacccttacatagaggaaaagctttccaatctagcgaatgatgaacagcctttacataatttatagtcatatttaaggaggtttccaaaagtagcatcctgacacattctattacacctttttttatcagcccgagcggcctttccttaacggtgtatacattttctaacagtattaagtcaaaaacagcagcatcaaaagtacgactacttttacaagatttctttagatatttacttcacatagaagaagaaaatcaacggaataaaaatccaaaaatcatgcttaaatctggtagactcaactttctcaagttgaatatcaattcacgattactatactcaacgaaccctcaactgactaagaaggtcattggtatcgacctgggtaccacgaatagtgctgttgcatatatccgtgattctaacgacaaaaaatcagctacaatcatagaaaatgatgaaggacaacgaaccacaccatctatagttgcctttgatgtcaaaagctcgccacagaataaagatcaaatgaaaactcttgtagggatggcagctaaaaggcaaaatgctattaattctgaaaacactttctttgctacaaagagacttattggccgtgcattcaacgacaaggaagttcagcgagatatggctgttatgccatataagattgtcaaatgtgagtcaaatgggcaagcctatctcagcacgtctaatggtctcattcaatcaccaagccagatagcatctatattactgaaatacctgaaacaaacttcagaagaatacttaggcgaaaaggttaatttggcagttattacagttccagcatattttaatgattctcaaaggcaagccacaaaagatgccggcaagttagctggcctaaatgttttgagagttattaacgaaccaactgcggccgccttaagctttggaattgatgataagaggaataatggattaattgcagtttacgatttgggtggtggtacatttgacatatccatcttggacattgaagatggcgtgtttgaggttcgtgctactaatggtgacacgcatttaggtggagaagattttgacaacgtcattgtaaactatattatagataccttcattcatgaaaaccctgaaattacacgggaagaaattacgaagaacagggagacaatgcaaaggttaaaagatgtttctgaaagagctaagatagatttatcccatgtgaagaaaacttttatcgaacttccatttgtatacaaaagcaaacatctacgagtgccaatgacagaggaagagctggataatatgactttgtcattaatcaacaggactatcccacctgtgaagcaagcattgaaagatgccgatatcgaaccggaggatatagatgaagtaatccttgttggtggtatgacccgtatgccaaagattagatctgttgtaaaagatctttttggtaagtctccaaattctagtgttaacccagatgaaacagttgctttaggagcagctattcaaggtggtattctatccggtgaaataaagaatgtcttacttttggatgtgacaccattgacattagggattgaaacatttggaggagcgttctcacccttgatacctagaaatacgacagttccagtaaaaaaaacagagatatttagtactggtgttgatgggcaagcgggtgttgatatcaaagtttttcagggtgaaagagggttagtgcgtaacaacaagttgattggtgatttgaaacttacaggaatcacccctttgcctaaaggcattccccaaatatatgttacttttgatatcgatgcggatggtatcatcaacgtatctgccgctgagaaaagtagtgggaaacaacaatccattactgtaataccaaattctgggttaagcgaagaggaaattgcaaaacttattgaagaagcaaatgcaaatagggcacaagataacttgatcaggcaaaggttagagcttatctctaaggctgacattatgataagtgatactgagaatttatttaaaagatatgaaaaactgatttctagcgaaaaagagtattctaatatcgtagaggacatcaaagctctgagacaagctataaagaattttaaggctaacgaaaatgacatgtcaattgatgtaaacggaataaaaaaagctacggatgcgctacagggtagggcattaaaattattccaaagcgcaacaaaaaaccagcagaatcaaggtaaataagtgaacaaaacacaaataagacttgtatattaacgtgtatatcgttcattaaagcatattttgacgtatttatactttatacatttatatatttctttcccgtttcaaattttcggttcaaataaagttgcatgtggattattatgttcccataaattctagtttttattattttccttgcaccgtatacctttatagagatttgttcatgaatcttcttcttgtgaacgccaaccaaaactttgagggatattccttagaatctgtagagctatagactctttctaatagtctcattgccaattcttgacggaattgctgaatataagtcttcaacaagtccatcgaattatgatcttgtactggaacttggtaaacattattcagagggaaacccggtgtacctggtaaagtaaagttgtccaaggccacattggttaacactttgacggcttcgttaaatgacgttgttattttcaaatgggctaggcaatcattgataaagagaattccgtagatgagcactctgtcggcgggtgatttaatttcaaaattcttgaagaaggaattggcacgaaataggtccaagcactcgtcgataatatcgtaatcggaattgctggggtatgcaggacccctgaacttagtgttcaagggcagaagcgcaaagttccctaccatgcggtcagtgttaggatctacagggaaagtcgagtgatacgcaggcatttattaatatactgggagtggagagactgataataccaataatcttcctttattgatgtttgttactgcgcaccaagtgtttaatttattgttattcattgttatactaaaccaaaccgcaacggaaaggataggggttcgtggtggatgatccgcgtaacggccgagtctgtgaaactgagagagaatgatagtgaaaacaatggtatggaagtccgaggtcctaaggcttgaagaaagtttttaaagggcattatgaccagtgagtactgacgacctaatttaataacagtattgagccgattaggttttcctggattttttttttgctgttttatagctatttttttatttgttgtttgtggtcattaatatattcattcgctctgttagtgtaatcgattacagtgctctattactgctgacttaattggacaattcatctcttttcctgcggttatgagcgaaaccaacgttgacagcttaggggacagaaatgacatatactcccaaatatttggtgtagaaaggaggccagattccttcgctacttttgatagtgactcgcacggagacataagttctcagctgctgcctaatagaatcgaaaatatccagaatctaaatgttctgctttctgaagacattgctaatgacatcattattgccaagcagaggagacgttctggagttgaagccgccatcgatgattctgatataccaaataacgaaatgaaggggaaaagctcaaattacattttatcgcagcagactaatattaaggaagttccagatacacaaagtttgtctagtgctgataatacacctgtgagcagtccaaagaaggcaagagatgccacatcttcccatcccattgttcatgctaaatcgatgtcccatatatattcaacgagtaatagtgctagtagacaagccaagcactataatgaccaccctttgcctccaatgtctccaagaaatgaagtttaccagaagaataaaagtactacagcttttgtgcctaagaggaaaccttcgctcccgcaactagcacttgctggtcttaagaagcagagcagtttttccaccggcagtgcatcaaccactcctacacaggctagaaaatcgcctttgcaagggtttggtttcttttcgagaccaagttccaaagacttgcacgaacagcaccaacatcaccagcatattcagcataataatattaacaatcataataataataatactaataataatggcgcacattatcaagtgggtagtagtaacagtaattaccctcaacattcacattctatatcatctagatcgatgtcgttgaactcatctactctaaaaaatattgcatcatcttttcaatcgaagacttctaacagcaggaaagctacgcaaaaatatgatataacttccaacccattctcagatcctcatcatcatcatcatcatcatcactcttcaaacagtcacagtagcctaaataatgtccacgggtctggaaactcctcaagtgttatgggaagctcgtctaatattgggttgggtcttaaaacgagagtttcttccacctcattagctttaaaaagatacacttcggtttcaggaacttctctatcttctccacgtagaagtagtatgacacctttgtcggcatctagacctgttatgagcgcttcatcaaaaaaacctcaggtatatccagctttgttgtcaagagtcgccacaaaatttaaaagttcgatacaactcggggaacataagaaggatggattagtttaccgtgacgcatttacagggcagcaggcagtcgatgtcatctgtgctatcattagaacttctgatagaaacttagccttgttatttggtagatcactagatgcacaaaagctgttccatgatgtggtatacgagcacaggttaagagattcaccacatgaagtttacgaatttacagataactcaagatttacaggaacaggttccacaaacgcccatgatccactgatgctactcccaaactcatcatcttttaattccgggaaccactcttatccgaattccggaatggttccatcaagttcaacttcatctttgaatagtgatcaggcaactttgacagggtcgaggctacatatgagtagttcattgtcccagcaaaagaaccctgcagccattcataacgtcaatggtgtgtttacattactggcggaatgctattcccctacgtgcacaagagacgctttgtgttactctatttcgtgtccaagacgtcttgagcaacaagcaaggttaaatctgaaaccaaatggcggcctgaaacgtaatatatcaatggcattggatgatgatgacgaagaaaagccatcttggacaagttccgtatctaaagaggattgggaaaacttaccaaaaaaggaaataaaaagacaagaggctatttatgaagtttatatcacggagaagaactttgtaaaatcattagaaattacaagagacacattcatgaagactttggctgaaacaaatattatttcagcagatattagaaaaaatttcatcaagcatgtttttgcacatataaacgatatctattcagtgaatagacgttttttgaaggctttaactgataggcaaagaagttcaccagttgtgagaggaattggggacattgttttaagattcattccattttttgaaccatttgtttcatatgtcgcttcaagaccatatgcgaagtacttgattgaaacccaaagatcagtcaatccctattttgctagatttgatgacgatatgatgagctcctccttacgtcatggtattgattcgtttttatctcaaggtgtttcaagaccaggtcgatatatgctattggtcaaagaaatcatgaaatctactgaccccgagaaggacaaaagtgattatgaagatttaagcaaagccatggatgcattaagggattttatgaaaaggattgatcaagcaagtggtgctgcacaagatagacatgatgtaaaattgttgaaacaaaagattcttttcaaaaacgaatacgttaatttaggattaaatgacgaaaggagaaaaattaaacatgaaggtatactatcacggaaggagttgtcaaaatcggacggaacagttgttggtgacatacaattttatcttctagataatatgctcttatttttaaaggccaaagcagttaataaatggcaccagcataaggtattccaaaggcccattccattgccattgttatttgcatgtccaggtgaagatatgcctgcgttgaggaaatatattggagaccacccagattgttcaggaactgtaattcaaccagaatacaacacgagtaatcctaaaaacgcaataactttcttatactacggtgccaagcagagatatcaagttacattatatgctgcgcaatacgctggattgcaaacgcttttggaaaaaataaagcaaggacaagcagctattataagcaaaacggagatgttcaatgtaacgaaaatgagcgataggttcttcgattacaccaacaaaattaacagtgttacttcctgtgatgggggtagaaaacttctgattgcaacgaactctggattgtatatgagcaacattaaaagacagcagaataaagatcatagacataaaagctctgcttttttttcaactccaatccaactagtacaaagaaataatatcactcaaattgctgtattagaagaattcaaatcaatcatacttttaattgataaaaaattatacagttgtccgctgtcattaatcgaagcagaaggtaatgggacatctttcttcaaaaagcatcacaaggaactgatcaatcatgtgagtttcttcgcagaaggagattgcaatggtaagagattaatcgtgactgcacacagttcatcgcattcaattaagtacttcgagcatgaacatccattattggccgaaaaaaatggtagtggtagcggtaacaaaaaaagtctcaagaaaaaaatcaccgaggttatttttgattctgaacctgtctctatttcatttctcaaggccaacctatgcattggctgtaaaaagggttttcagatcgttagcatttcacagaatgctcatgaatccttgttagatccggccgatacatcattagagtttgcactaagggatactttgaaaccaatggcaatctatcgtgtgggaaatatgtttttgctgtgttacacagaatttgccttctttgtcaataatcagggttggagaaagaaagaatcgcatattattcattgggagggagagccccaaaaatttgcaatttggtacccgtacatcttggcattcgacagcaacttcattgagatcagaaagattgaaactggcgaattaattcgttgcgtccttgctgataagattcgacttctacaaacaagtactcaagaaatcctgtactgctacgaggattatcgcgggtatgatacagttgcgtcgttagatttctggggttaagatagcaacgtatatagactttccttattttctttagaataaaaagcataactaaagttgtaaaaggagcagaattatgaataataaacattgatgacaatagtggaaaacgacataaataataattttataatataataatgataattcaccgtcagagggatttgtatgcaaatgattgatgacgcgagaaaaaaaaacgcgaaatttttcttcccaaagcttcgaagtttttattccgtccacaaagtgaaaaattttcagaaaattttccagactgtgaataaacaaaaggttggcttacgcatttggcttgtcttttttttttttcacaggttcttagtaaataattgtataaaatatttatctggagtcttctgtttgttgtttagccttgtttgaagttttatttaacttattaccccagttaggtactgtgtattttccgcatatctggtgtctttttatttggtcattgattggtttttgacagctcttcactcgcttcaagcttacttctagtttatttattcggcttttttccgtttgtttacgaaacataaacagtcatgaacactaccacatctactgttatagcagcagttgccgaccagttccagtctttgaactcttcttcttcatgtttcttgaaggttcatgttccttccattgagaacccattcggtattgaattatggccaattttctccaaagtgtttgaatactttagtggctatccagctgagcaattcgagtttattcacaataagactttcttggctaacgggtatcatgctgttagtattattatcgtttattacattattatctttggtggccaagctatcttacgcgccttgaacgcctctccattaaagtttaaattgcttttcgagatacacaacttgtttttgacttctatttctctagttttatggttgctgatgttagaacagttggttcctatggtttatcacaacggtctattctggtctatctgctctaaggaagccttcgcaccaaaattagttactctttactatttgaactatttgaccaaattcgtagaattgattgacactgtgtttttagttttgagaagaaagaagttattgtttttgcacacttaccatcacggtgccaccgctttgttgtgctacactcaattaattggtcgtacttctgttgaatgggtagttatcctactaaacttgggtgttcacgttatcatgtactggtactacttcttgagttcatgtggtattagagtttggtggaagcaatgggtcactagattccaaattattcaatttttgattgacttggtatttgtttactttgctacctatacattctatgctcacaaatacttggacggtattttaccaaacaagggtacttgttatggtactcaggctgctgctgcttatgggtatttgattctaacatcttatttgcttttgtttatttccttctacatccaatcttacaagaaaggtggtaaaaagacagtcaagaaggaatctgaagtttccggctccgttgcatccggttcttctactggtgtcaagacctctaacaccaaggtctcttccaggaaagcttaaataggaagcgagaatttttgacagcgaatgaaaaagaaaaaaattaaatgttaacattttctttatattaaatatgtacgataaatgaaatcattattatagaaatgatagattattggcttggtgtttttcccattttgattaatcatttccttagctgcccaaagaattgcacgcttacagtgaggagtagtgatacattacaattataaaataaaattatatagcagctaaaatttaaaacaaacagactttgttcctttgtatgtcctatggaagatactgacttgcagtttgtaaagtgtccaagtcgtaatccactttacttgccacgaattgatcattgaataatttaattttaataatctcttgagttaaatcgggatgtactctgggaatgaagtcatttaaaaatgagtactctcccctaatggaggaagatgactgacattgcattatcttgaacaaaattctaattatcggcccagcatcattatctaagtattgggaccagaacgcgttacacacaggaacatggatatcaagtaactcttcaatgaagttcattggttgttctagctctccaataatagagtcctctgttattattctcttcttgaaacggccactatctctaatgaaattgctttgttcacaatacgacctgtaagatatgggtacgatggagtttactgtactcaagtaatcatataagtcctcttgaatgatttgtaaaaagatactatctatttcctttgatatggtagagtccgataaatgatgggtatcgctaagagaaccaaatgataggttattattgctattctgtggttgttgttccggtaatacagaattttctccaccagtaggatctatatctattcttgatgcgggcgtatttgaattcgagtggttgtcgttgtcgttatcatgttcgttatcattattgtcgctgttgttgccgcttctattgttgatgttgttcgtctgattatcagtgtgaatgttcatgttgctatgattggaagtattatgactgttgttaacgttgcctattgtgtgtaaattcaaaaaccttttcaataaactgaaaattgatgtagaaagtttgtcgactatttcagaaagtgaaatggtatgaaaagaatattccaggacttctctttcgaataaaatcgcaggacacaagaacattgctaaaaggttcatatcgtctgaaaataaaatggttttgaattcttgaattttagacaaaaatgtttcaaatggtgcaattaaccgttgaaattgtaggctgcccaaggtggacaacagatgcttttcaatagacattatggcgaacaaaacataggtaaagtttaagcttttggaagaagtaaagaactttagtattctattgatggaattcaaagtaattaataaatagtctattatttgaaagtcgatttcgttgaatttttcaatttggatagaagattgatattcttctattatgggacgaaggttcaaaaaagtttgcagtgaaacggtggcggtagagtaacgggataaatcgaatttcgaacaaacgaattcgaagccaaatttttcacacaatgaacggaatttatctaactgccacgaattagattgtaaatcatccaaaaaagaattgattctggaaaaaatggaattcgaaatatctatatttgacaaatcaattagagagtccaataaagtcaaaggttctttggagaatgatgattgtctcggatgcgtaatatcggcggatttaggcgtaccgaacaatggcaatatcgcagaatttattatggaaataatgcaattgtgataatagtttttagcattcgtatacgtattcgggaaaaagggttggctatccattacgtttagtagatctactatttgagatcttggtagagtgatagaaatcacagtattttgtaaaccaggtaattcttgtgagattttgagcagttgagctggaatagatagtttggggtcattgttatattcatgtaagttttggatgataaggggtaaagtctttacttgggaatgaaaatcatcatagtactgaatactcaatatagatatcgtgttattccaaacggagtggcttagagagaaaaaattgattttttgcatttcaaataattggttcttcaacctgtttgataactgattagatctatcggttgggtccattagtaagtagtttttgtcgataatcaacgacaaatcggaattgtttcgcaaagctgtcctttgaatgattctatcgagattatatgcgatggacctgatagcattcagaattaagtcatggtcaatgaagcttagtgagttggcgttctgattgatcaaaaggcgtacggcagtgttgtctacgaacgacagaggcaagttttctgatgcaattatgatcgcaagcgactgcacaagaggcaaggccatttctttttccctagttctcttcaaaaagtcctcgtctatttccagcaggttagcaatgctgttcgttgtggcgctaccgccttgatggttcttcaaaggtggtctgaccataaaagtagaacctgcttctacgcccgtccatccgctatagtaattggcattcgggtctatcttatgcgtgctccacaaatgagtttgcgaggcttccgccatgcttatgctgtttccttgccgtcttattatcacaccgcagtacttgcattttactgcctccagcatcttgtctacacccagaaaatggcccaagtagcgtgacctgtctctggtaagcatatatgcgggcacccattcgctaccatcctctgctaacgactccctttcctcatctctatctccatctgtatctgtatccgtatttgtggccgtcgtagccgccgtcgccgacgatacagttgaattcatgggaggcaacaccaatcctctttcagcactctgtacctgtgtgtccatcgctctcatatgtgctctcgtgcttgtttatcctgtggatgctgccagcaaactctctctttcccatctcttgatggttcatgttatgtgttgtttattgtttgctgatcccattcgcgctttcccggccgtggtaaatgactacacggtgaataattgcgccattttttcgccgttgcggtgttttttttgtagccgttggaagcatggcagtaccatctggaacaaagcaacggtataaagaagacagactgttggtaagcgctgcatgttggtgacaaaaagttggtttcgagaaatcagggtgggtgttttttgtgtggcatgtgcagcgagcgatgagtaatgcaaacaatagtgctatgaaccacatcacgttgcctcccatctcgtcatttgacaaccttatcaaggcagccgagagacaatataatggcgaggcttcgtccgcctcgacacatccgacactgcctaatatgaacattagtaacggcagtggcagtgcgggcgcatcatcgtcgatgctgagctatcagttgcttccgcactccaatgatgtgtcccggtcgaactccagctcgagcttccttccctccgtgcagcagcctacggaaggttccgcttctgcatcggaaacttcttcatctgcatcaccttcacgttccatttcaccaattttaaaagtggctggtccttcatctgttggcggtgccggggtgagtaccccccatagcaccaaaatcaataagccaaggaaaaagaagcaatgtccaatttgtcgtaatttttatgccaatctgaccacgcacaaggcaacgcacttgacgccagaggatcggcctcacaagtgtcccatctgccaccgcgggttcgccaggaacaatgacttattgaggcataagaaaagacattggaaggatgagatactgtcccaatcgggagtactttcgaaccataatgatggtaagggaggatccgtttctcccaatgatgatgatacccatgaaaaaatgacaccgatgaattctgtcacagattatgcacaattgaaatcgttgcatcaaatcaagggcacattcaagtgcccattcaactccaccttaatacaattggacatggatatgtacccgtataaactgaaacctttaaattttgagacttccaattgtcaccagacgggggtgttctcacgttgcgacaccttcaaaaaccatttaaaggctttgcattttgaatacccgccaggcacgaagaaaaaggatagaaatgttgttcctggtagatgtaagcattgcggcctgaagttcgagaacgttgacgtttggctcaacgaacacgtaggtaaacaatgcggctataaataccattgattcccggcagcataacgacttttcccctgtttttattagtactagtagatatttaatttatgtatctgagtttttaatgttttttttccttctcttatcattcttcaagtgcggctatccttctgtactgtggcctgccgtcaacaacttctctgtagattatcagatccattcccttcatgtatgaatcaggtagttttgtggggtacagtgtaacgccgcttttcctcttgattgaccacttatcaactaaggtgttttcgataccattatagaagtctgtgggaaaacttttggtgatgatccagcagcccaaaaattctcttagtttccttagaatcttaaacagtttttcaaatttcgataaatttattacatcatagtttttgtcgctttcaaaattcaagaaagacaaattgtcgattactattcctcgtaattgaaagttgaaattatcaacctggcacctccttaacgcatccatgggagagtcatacagtaactctagaaatacgattaatcccgtgatgtttatgcaagatagcgaattcatgtagatcgcgccatgctgtctttgcttttgttgggaccatattgatactatatctatgattaggatcttttcgtcccccgtagtacaattcaccaacttttgcagcgctaccgaaggtttaaaatcactttcaatgatgtgcaagaaccctagtttactctcctgctcttcactaattaggtttcttaattcatttggtaggtttatatagttcttggttgatgtgatgaagtttgacaaaggataaattctaatgttctttaaaacttccatcccattccattcgctacttcctttctcttttcctaagaattttcattattagaaggagtaatgcttacggtacacatacatacacatatatatatataaatatatatatatataaggacatatacagatttttttttttcgcgtactaaagtacagaacaaagaaaataagaaaagaaggcgatcattgaactactgtgacttgccaatatggtctaaaaatttgtcaatttcacctgaagaacccaaccaaatagaagatttgtcatggatatgacttggcaccaaatccaagattctctctccgcgatcgttgaccgcttttccccctgcttgttccattaagaaagccattgggaaggcctcataaagcaacctcagttttccgttggggctcttcttgtcgcaagggtatgcgaaaaggccaccgtaaagaaacgtcctgtgaacatcagcaaccatggatccaacatacctagccgagaaaggcttgttgttgttgtctgcttggggttgtttgactttctcaataaatgttcttatagtctcgttccagtagagggtgttaccttcattaattgagtagatggccttttgaggcggaattcttaagttaggatgagtcaagatgaattcgcccaagtttgtgtctaaggtaaacccatcaactccatcacccaatgtcaatactagatgcgtagaggatccgtacatggcatagcaagcggctaccatttctttaccacatctcagtacgtcgtttatagtacctgatgagtctggtagcagtctgaatatagacgcgatagttccaacggagacaccggcgtccaaatttgaggagccatcaataggatcacaacacactgcgtatgagcccgtgtttgtgggaaaaacgatcaagtcttcctgttcttcagatacaaggaccttgatgatcccactagccctcatggcattgataaatatttcatcacctagaacgtccaacttcttttgctggtcaccagtgaagttggaagcgcctgctaacccaaccaagttaaccaattcagcacgtctgatggtgtgagatacaaatttgaacgcgaattgcaaggcattcagtactaatgtgaaatcaccagtagcgttcttaaattgcttctggtgctcgattatgaatctaggaagagtgatgatatcggtatcaaacccttcggtagagtctcttcttggtccatttactagagttggcatatgtgtggtagtatgagggatgtttcttatatgttcgcactgttattcttaggcctatcatacaaaaagcaagatcaagacaaaatacacgtctgtaattgcactacttgttgctccatatatatacgtacatttgttagcgagtgaaatggataatattgcctatacataggacgatccttataatatagtgtggggaagatgccacaagttggcaagcgacaggaagaaaccaagcaaaccaaaaaaaaagtagtgggtattggccagttcggcaatcttcgccttcaaattccctgtctcaactttttaagctttcttgatatgtgggaataccaggctattgctgccttgcgttggctcttacgcccttaacattacctagctttactacataatgagctttcgggcccgcataactccgggtgtccgcacgaccgcgactactaagaataataataataccccggaggtgaattcaaaagcggcgattccatccgtccggaaaagagagcagaagttagcccgggaccatgcagtttgatgggttgtctatcttagactggaaaattcgaagaactcatccttgttagctcagttggtagagcgttcggcttttaagcgcatttgcttaagcaaggataccgaaatgtcaggggttcgagccccctatgaggagttctttactttttttttatcaacttcctttgcttcacgcctattataaatttagatcgcgtatgatattgttaatcggcggttagaatttataaaaatcgacgattttctaggaattatttgcgcatacatatatatagttatttagctctatacaggtgtaagaaggcgttgataaaactatggtaacaaaataaaaaaatagagggaggggtgtggctaaatgcgattttttttttctttggatattattttcattttatattcacatcaaatcagaaaatcctggaacgaggttcttagtaaacccaccttccttggcggcagcttcgtagtagccgtagatggtggtagtagccatcaaaatggatgccccagaacctaaagtacctagtaggtcggagccaacagaaagagcaccgatggtagcaccgccgaaagcagcagcagttggaatgatcttcttcaattctctgtaaatggaggtttctctcttaccgttaatgaccatgccttgatctttgaattgtttggcaatgtcacgtggggaagtgccggagatttcgatccatgtcttggaaaatactgcgcatgaaccaagaacaaatgtgatgtagacgatggtcttgatagggtccagaagagcttcggataaagacattaatggttggatgtagtaggccaacccgctcaaggccatttgagggccctgggtgcccggcctgataccccaaacaccgatcaaacgaatcaatggattggttgggtatttctggaaaaggatttgagagatcaagaaaatgttagaagtcaatgcactctgcaacatgattggggtgttggaagtataaaagagtttgatggggtagataccaatttgacctctcactttggttgacctgatgggcaattcgtaacggaagccttgtaaatataaaacaaagaggaagatggccacggtcatcaacacttggaacatattaggtagattggtacggtaaaaggcctcgacaagggctcttttcttgtcctttctgacagccaaaagatggaaaaaggcaatcacagcaccttcgaactccttaccacgaccggaattgactgtagtaggagcaaacgctctccagaaaatttgttcggcaatattggttgccgtgaacagagaaataccggaacccaagccgtaacccttagatagcaattcgtctaataacatcacaatcagcgatgcaaacatcaattgaaagattaacaacaaacagatgggcaatccgaggtccgaaggggcaccgtagttacctgtcatgacgaccacaagggcttggcccaagatcagaataatagcgcacaccttttgagcaatttggaacagctctctgtcctgcttgctctcaggtctgatttgtaaaagctgagtaccctgcaaaaattggaaaatcatagatgaagtgatgatgggcgaaacacccaattccagtaaagtaccacggttggaggccagcatggcacgtagccagtacagagggtcggaagtctcactggacacgatcccgtacagcggaatctggcccagaatcaaaaagatcagtagagaaacgcctgtccagataagtttctggttgtatggaaccttcctttctggagcaatcacttccggcaggaaagattcaaatggcttaaacaagtctagaacacggttggaggacattttcaaagtaaagcgtgaaccagtgtcagtttttctacttgctactatatttaactatgtttttttcttttgctttcaccaactgaaccttgtagtaaatggagtgaggttgaattgaggactgaaaaaaaggttagttcggaggccgctgaagtttccgattgggagcaggaattgaggatggagggtgcaaagtgaggtccttgatttgttgtttttacactaaactacgttaccaccgtaacgccaattcaaggcaggaattatgcttgttgtttggcaaaagttgccgaaagaaagaatgagagagaacgacaaagagaatgagagagaacacgtaaagcgaaaaatctggagcgctgccgcgccgggtaacaagtgtgaagagagagagagatgtaaggaagatgaatacattcaatacattctagcttatagcaagctttcagcaggctcaattgcttatagcggtataactgcaacaagagtgaaaattaatatggtgacgaacgacggattcggtagtacagtgttataatgccggcaattaccgtatgccatcggaatccagatgcatttctgaacctttccactcgggaaaaccactcgtcatgtcacacggagagttggccatgaactggctaatgggatggtctaaggcgaccactgtaagaagaacaagagatgatgcaagctaaagcaagcaggtctcaaataaacgctacttgtgccgttgacagcttgtttatcttgcacatggcaaggccatcgcgtccctgcgtcccaagagtgcgcggtatacgtgcggccctaaacgaggcggtctctgttctctgatatatttcttttctttcttcgttgttttgtttcgtgtttgttgagctcctgccttcaatcggcatcgtcctcttgcgtacgtacataaaatcgttacagctttgttcacatggtgaaaacaatagcgtttggtacgctctttaaatcttggcacttggtcacttacgctcctttaaacaaaatcaaacatacaaatatacggatacgtacgcacacagaagcataaaagcacaaaagcacataagaagaccacatataaactagattatgtcctttgatagacagttgaccgaagaccaggaggtcgtccttaagcaaatttggacacaccttttccatctgtggcaagttcccgtggatggaactcatattttccctaataactccctccactcctcgtccacccctgctaagaagaagaaatcatcctggtttagcaagcttcagtcctcagaccatacacaggactccagcgaagccgctgaagcggcacacctctatgaaaagggcaagatacacaaggcactagccaatctagacccgcaaacgaccaagaagcagttctggcacgatatcaagaatgaaactccagacgccaccattttgaagtttatcagagccagaaagtggaacgcagacaagaccatcgccatgttgggtcacgatttgtactggcgcaaggacactattaacaagatcataaacggtggcgaaagagctgtgtatgagaataacgagaccggtgtcattaagaacctggaattgcaaaaggccaccatccagggttacgacaatgacatgaggccagtcatccttgtgagacctagattacatcattcttccgaccaaactgaacaggagctggaaaaattctccctgttggtcatcgagcaatcaaagcttttcttcaaagaaaactaccccgcatccaccaccatcttgttcgatctgaacgggttctccatgtccaatatggactatgcccccgtcaagtttctaatcacttgttttgaggctcactacccggaatctttgggccatctacttatccataaggccccttggatctttaacccgatttggaacatcatcaagaattggctggatccggtcgtcgcgtccaagattgttttcactaagaatatcgacgaattgcacaagtttatccaaccccaatacatccctaggtatctgggcggagaaaatgacaatgatttggatcattacactccaccagatggctctttggacgtccatctgaaagacaccgagactcgcgctatgatcgaaaaggagagagaagaattggtcgaacaattcttgactgtcactgcccaatggattgaacaccagccattgaacgatccagcatacattcaactgcaggagaaaagagtacaactttccaccgctctttgtgaaaactactccaagttagatccgtacatcagatcaagatccgtttatgactacaatggttctctaaaagtttgagccaagccacgcgacgctccatactgtatagacctttattataaaaacatctatttctttatatgtccctctatcttatttttcttttacttttatttgtataatacgcgaaaaattatagaatcatttattatcaaaaacaatcaactatgaaatgaaaaacaatacgcctgctaatacggttcgcccttcaatttttgttttttttacatgaatgagtcttatactagatgatatcatcctctcactaacgaatgctaacgaacgaacgccaccacaggcccttaaaaccactttaagcctgctatacgaaaaatcaaaacaatatggtctttcttcgccgcaactacaagcacttgtaaggttactctgtgaaacttccataatagacacagttacaaaagtgtacatcgtcgaaaattgctttttacctgatggctacttgacgaaggaacttcttttggagattattaaccatctcggtacgccaacggtattctctagatatcgcatacaaacgcctccggtcctacaatctgcgttgtgcaaatggttagtgcatgtttatttcctatttcctgtacattcagaacgagaacacaatatatccagttctatctggttacatttatggcaattctcgttcttacagaagtggataactcccctggttatttggcaagccacgacgcccgttgatgtcaaaccttggaagttgtctattatcaagagatgcgctatgcatccaggttaccgggacgctcccggtagtgcgacgcttattttgcaacgatttcaatgtctcgtgggcgcatccagtcagattactgaatcaataattaccatcaattgcaatagaaagactttgaaaagtcatcgaaacttaaaattggatgcgcatttcctatccattttgaaaagaatattatccagagcacatcccgctaattttcccgctgacactgtccaaaacacaattgacatgtacttgagtgaaattcatcaattaggtgctgattctatatacccacttcgacttcaatcacttccagaatatgttccctctgacagtacggtctctctttgggatgtcacttcattggaacaattagctcaaaactggccacaattgcatattcccaatgatgtagattacatgatgaagccatctttaaacagcaatgttttactgccgcgaaaagtcatgtctagggattctctcaaacacttgtactctagtatcattctcattaaaaatagccgcgatgagtcgtcatcaccatacgaatggtgcatttggcaattgaagcgatgctttgcacatcagatagagactccgcaagaagttattcccattattatttcggtgtcctcaatggataataaactgtcttctcgcattattcaaacgttttgtaatttgaaatacttaaaactcgatgagcttacgttgaaaaaggtttgtggcggaatcttgccattatggaagcctgaactaatcagtggtacaagggaatttttcgttaagtttatggccagtatttttatgtggagtacacgagatggtcacgacaataattgcacattttctgaaacttgtttttacgttttacaaatgattacaaactgggttttagatgataaattgatagcactcgggttgacactactgcatgacatgcaaagcctgctaactttggacaaaatctttaacaatgctacttcaaacagattttctacgatggctttcatcagctcgttagatattttaactcaactgtcgaaacaaacgaagtcggattatgcgatccaatatttgattgtgggccctgacatcatgaataaagtgttcagttcggacgatcctttgctattatcagctgcgtgcaggtacttggttgctacgaaaaataaattgatgcaatacccgtcaacaaacaaattcgttcggatgcagaaccaatatatcatggatttgacaaattatctttacaggaataaagttctgtcatccaaaagtttgtttggagtctcaccagatttctttaagcagattttggagaatctttatatcccaactgcagacttcaagaacgctaaatttttcacgataactggtataccagcgctatcctacatatgtattattattctaagacgactggaaacggccgaaaataccaaaataaaattcaccagtgggatcataaatgaagagacgtttaacaatttctttcgagttcatcatgatgagattggccagcatggttggataaagggcgttaataacattcacgacttgagagtaaagattttaatgcatttgagtaacactgctaatccatatagagacattgcagcattcttgtttacatatttgaagagtctctcaaagtatagcgttcaaaattcttagaatatgcatccacatttatatacatatatatatatatatatatattataacttccaaaaaggagattggacaatttatatctataaggcattaatatttaactatttacaagcactagtggtaaattcatggcgtcatatgattacttgtggaataagaaactaatcacattgaatttcatgacaaattttttgatttttttattcatcaaatacattctcccttccggtaagttcatcaaagtttcaataacagcatccctacctaatttcaaaaagtttttgtcagccgtgtacatgaatttgactctgccatttaccacaatttgaaactttttgaatttggactcagtagtgcgctcaacttctggccagcggtattggttccattccatttgggagttgatcatctctgcagcttcttctgaaattgacgggacagcaggatatataacggttaccaacttttgtaaattctgtactatcatttcattccttacttcaccttttttcaatgcactttctaaaatattggttagcttcatataatcagatattacagtgtttaacgatagattaacttcaaatgattccgtaattgatttcaagaagcgttggaaatcgttgtgaaatttcacttctgcatcatttaagtcggtcggggtcttgtagtctttacttattgccaaatccttctcgagactgagaatatttttggtcaaatgaagaaccttctgcaaccaacgttctataccaacaatcttggattcatcccaattcagggcatctgcaattggactttggaagaggatatgtgctctcgtagcatcaggtccatgtcttaaaatacattcatttggatctgcaccattgtatttagatttcgacattttttcataagagactaccggaaccttgccatttgatttaataatcactgtgttgccatctggagagtcatttacaaaggttaactcgtcaggcttcaaaaatttaccagaatcggggtcaacataggttttcccttgaaccattccttgtgtcaccagttttttgaatggttcgaagatgccagcagggtcgctccatgcattgatagatccgagaaatttagcaataaaccttgagtataacaagtgtaagatagcatgttctactccaccaatataaatatcaaccggcatatttttacttgcaatttcacgatcaaatggttttgaagtgtttttgggatccaagaatctgaaataataccaagaactatcgataaaagtatccatggtgtcagtttctcttttcgcagggctcccgcatgaaggacaggcgacatttacaaattcatcgattgtggacagcggattcccttttgtatccaagccttcaagttctggtagcttgacaggtagatcactttctggaacggggacaggtccacagttgtcgcagtgaatgatgggtattggagtaccccagtatctttgtctacttatcagccaatctctaattttgtatctaacgacgctcttagacagtccttcgctattcaacatccccattatcgatttccttgccactacagtgagaactcctgagtgttctccgcattctttggttaggacaccgtcagtagatgtgaacgggacagtatcaattattctttgtctttcctgttcagttacttttgaagcatcgtcaaaaaaaggtgctatgcacgtcttgatatgttcaccaggacaatttgtttgccaaaactcaaaatctcggttatcgtgtcctggacaacccattactgcactaggtgctgaaccatagctgctgaccacatatggagctgcaaatatggggacttcctctttagttaagggatttacggcctttatgttaggtaactgaaatccttccttcgtatcgtttggtaattgatcacttttctgtataaactcttttaaatccggcatttcctcgcagtatttttgtacaattgggtggtctaatgcgagagcaacatactgtacagcaaaaagagtttccggtcttgttgtaaagacaatcaagttttcaaatttggggtccgcaactttgaacactaattctgcacccacagattcgcctatccaatttttttgcatttgcttcacgttggaaggccagtccttcagttggttcaagtgctttttcaatttaggagcgaatttcgttattcccaaaaaccactgttttagctgcttcttttccacaatagcccctgatctccaagaacggccctgggcatccacttgttcattagccaaaactgtcatatcaacgggatcccaattaatttctgcttctttacgataagctaagccattttcaaaaagttttaagaaaatccattgggtgaatttatagtattcgggatcacatgtagttatttctctgtcccaatcaaaatttgccagcatactttgcatttgttgtttcatttttgcaatattgtccctagtccatatggccggattaatgcttctttctatagcagcgttctcggcaggtaacccaaaagcatcccatcccatcggatgtatcacgttgtaccctttttgtttgtaaaatctattcaaagagtcgctaatgacataaactcggagatgtcctatgtgaagcgccccagaaggatatggaaactggcacagaatatatttcgacccgctattcagagtatcctgcttaggcaagccacgggttgtcttctgtttccatttctccccaattgcaattaattttttcactgcaggtccagggccccttttagtggataggaatcggcttgaaggtcgagacagcatttttccaccgtacacacacgtcgatttattcacgtacagactctacaatatagagtactagcgccttgtttaacactctgctgtgctccttcctccaagttcttgattctccaccggagcaacaaaacgactttcttcggtttctttgattcttcgcggagataagaaatgagattcttggatcaaaaagtgtgtcagaggtagggaaatgtcaagcaagttcatgaacagaccaggagtagtatggcatggtattaaagatttttctgtggtatttgatagttaggcaaaaggaacattttcatccaagttttatcaaaatttctgttttatagtgaaaattctaagttaaacttgccaaaaacgcgtcgcgtatactaaatttcaatgtttggatctatcaacatgaatatttatatttcatgtagtgaagttcataataagaaaaaaagacaagaggcatataggttcgcaagagataagtagctgctgttaataataataaagagcatattcttgttagattgctaaatggtatgatttcgactacgattagtggtaaaagacctatagagcaggttgatgatgagctactttcactgactgcgcagcaggaaaacgaagagcagcagcagcagagaaaacgcagacgtcatcaatttgcccccatgacacagtttaacagcaatacactagatgaagacagcgggtttaggagctcctctgacgtggccacggcggatcaagataactttttggaagagtcaccttcaggatatattaagaaagtgatcttgcgaaactttatgtgccatgaacattttgaacttgagcttggttctaggctgaattttattgttggtaataatggtagtggtaaaagtgcaattttgaccgccattactattggtttgggagccaaggctagcgagactaacagaggttcctctttgaaggatttgattcgtgaaggttgttattctgctaaaatcatccttcatctggataatagcaagtatggtgcttatcagcaaggtatttttggtaacgaaattatagtagaaaggataattaagagagatgggcccgcttcttttagtttaaggtcggaaaacggcaaggaaattagcaataagaaaaaggatattcagacggtagtggactatttttctgttcctgtaagcaaccccatgtgtttcctgtcacaagacgctgctaggtctttcttaactgctagtacctcacaggataagtatagccattttatgaagggtactttacttcaagaaattaccgagaatttgctttacgccagtgctattcacgatagtgcacaagaaaatatggctctgcacctggagaatttgaagtctttgaaagctgaatacgaagatgccaaaaaactgttaagggaattaaatcagacttcagacttgaacgaaaggaaaatgcttttgcaagcgaaatcgttatggatcgatgttgcccataatacagatgcttgtaaaaatttagagaatgaaatcagtggcattcaacagaaagttgatgaagttactgagaaaattaggaataggcaagaaaagattgaaagatatacatctgatggtactactattgaagcgcaaattgatgcaaaggtcatttatgttaatgaaaaagatagtgagcatcaaaatgcaagggaactgttaagagatgtcaaaagcaggtttgaaaaggagaaaagcaaccaagcagaagcacaaagcaatatcgatcaaggtagaaaaaaagtagatgctttgaataaaacaattgcgcatttagaagaagaactcacgaaggaaatgggcggtgataaagatcagatgagacaggagcttgaacagttagaaaaagctaatgaaaaattgagagaggtaaacaattctttagttgtaagtttgcaagatgtgaagaatgaggaaagagacatccaacatgaacgtgagtctgaattgaggacaatttcacgcagcattcaaaacaaaaaagtggaattgcagaatattgctaagggtaatgatactttcttaatgaattttgatcgtaacatggatcggctcttaaggacaatagagcaaagaaaaaacgagttcgaaactccggcaattggacctctgggttcccttgtaacaattagaaaaggttttgagaagtggacacgttctattcaaagggctatttcatcttcgctaaatgcatttgttgtgtcgaatccaaaggataacaggttatttagagacattatgaggtcgtgtggcataagaagtaatatacccattgttacttattgcttgagtcaatttgattattcgaaaggtagagcgcatggaaattatccaactattgtggatgcactagaattttcaaagcctgaaattgaatgcttattcgttgatttaagtagaattgaaagaatagtgttaattgaagataaaaacgaagccagaaatttcttgcaacgaaatcccgtgaacgtgaatatggctttatcgctaagagatagacgtagtgggttccagctctctggcggatatcgactagatacggttacttatcaagataaaattagattaaaggtcaactcttcatccgacaatgggactcaatatttaaaggacttgattgaacaagagaccaaagaattacaaaatatacgggaccgttacgaggaaaagctaagtgaagtgaggtcaagattaaaggaaatagatggcagactcaagagtaccaaaaatgaaatgagaaaaactaattttaggatgacagaattaaaaatgaatgttggcaaagtagttgatactggtatattaaattcgaaaataaatgagaggaaaaatcaagaacaagccatcgccagttacgaagccgctaaagaagaattagggctgaaaattgagcaaattgcacaggaagctcagccaattaaagagcaatacgattctacgaaattagcattggtggaagcacaagatgaactgcaacaattaaaagaggacatcaacagtcgtcaatctaaaattcaaaaatacaaagatgataccatttactacgaggataaaaaaaaagtctacttagaaaatataaagaaaattgaagttaacgtagcagctttaaaagaaggtatacagaggcaaattcaaaatgcttgtgcattttgttcaaaagagcgaattgagaatgttgatttaccagatacacaagaggagattaagcgtgaattggataaagtctcgagaatgattcaaaaagctgaaaaaagcctaggattatcgcaagaggaagtcatcgcattatttgagaagtgtaggaataaatataaagaaggtcaaaagaagtacatggagatagacgaagcactgaacaggttacataattccctcaaagctcgtgatcaaaactataaaaatgcggaaaaagggacttgttttgatgcagatatggattttcgcgcatcattgaaagtaaggaagttctcgggaaacctttcctttattaaggataccaaaagtttagaaatatacatcttgactactaacgatgagaaggcaagaaacgttgacaccttgtctggtggtgaaaaatcgttttcccaaatggcgctgttattggctacatggaagccgatgcggtcaaggattattgcgttggacgaattcgacgttttcatggaccaggttaacaggaagattggtactactctcatagtgaaaaaactaaaggatattgccagaactcaaactattatcattactcctcaagatatcgggaaaattgcagatatcgatagttctggtgttagtatccacagaatgagagaccctgagagacagaataattccaatttttataattaatgtttcttcatgtaattattcaaaatattgtgtaatcgtctatttgaattcgttttcacggcagcatatttgaaaaaaaaattaatttttacatctaaacataaaaaacctaatcgttttctttccatgctgttatagagacatttattagtacgaatattttcctttctttacgagcactatagacagtaatttatataactaagaaaatggtatgctcaaaaatcaacaatatgactcttagggaaatcatgaatctctggaacaggtatttctgggatataatatacttccccattttcattaaccctttctctatccttttcgctaatagaataaatttctttaacgttagccttcaataaatcaagtacttcaacaaagttcttttgaatttggtgagcttgctctctcatgtttcgtctacaaagaccctcaacaactctcacagcgtctggttttgtttggtttaacctctcaatcaatcttccgactgactgaaccaaatattcttcttcataaatagttcccttcttaccacgagcacgcttacgctcttccctacgcttgtttttagctgtacgtctggaagcaccagtctttgcagtacccccagttttgcctgtgtatctggtgaagaatgattcttgtgttgacgtctcagaaggagcaacagaaacgtcatccgcttgctcagtttcctggccataaaaggcgtatgggttctcctccttcttcgcgcgtagctctctcaatcttcttaactgtgaattaatctggcctttacaatcggcgagtaattctgcaattataccaaaaccttcgcctaaaccgggatcgacaacttcttccaagagttcatctttcttggcctttatcgccacaagagaagcaatatcatatctataggccttacagtacaaagctacggcttctttaacattgtccaaatattccaattgaatatcagcagcatcaacatatctatgttcaaaagtcaaagaagatatcaactcttctgcgactgactcaacttcctctgggaatttctgaacagcgatggacatggcctcacgccatcttttcgctgattggtatgcccccattgcttctttgagctttcctagcatctcgtacgccaccgccgcatccgtatacatttgatttgatgacaaatgctttgcgtaaatgttataaataacattctgcttctcagaatcataacggtaaagtgctaaaccatgcttatacaaatcatgagattcaacatagtctatgacttcctctgaaacattaccatctttatcaatttcggacaagtgttccaaagctttttcatagttccctaagtaatcatcaatcaaaaacttacggcgtaaaggctcattatcttgtaattcttgtaaaaatggcagatattcacgaggatccatttgtgatttttgggcgactaataatgctaaactgacatcatacaaagatagggcagatttataaaccacgttgacgtcttgcaaaaaacacaagtaagttacacaagagtctttttcttcagaattttctagttcactaattagttttagtgcagccgataagttttgagggttttgggatgcatatgctgtaatgatcgtttgcaagtatttcttcttgtattcaggattgcttaataaaacatttagcacagcatcgcatattttgttgactttagaggttttgggatcaaacattttctttttcatatatatttgcatttcagtcagtggtgctggttccattccaaatgacttcgagatacctgaataaagggtttccttatattttgttttggtaacgtcatcttccgacaaacaggaaataaataaattgagataatcaacccttccgatttggttgataaatacttctaagttttcaataaataactctggcgcatagtcatgcaaaatatcaaggttaattctgtgtgtacgacaaacaataaacgcctctttataacgttttgccatgatattctttcttacctctgccagtaccataattcttggataaattgtttctagattaccacgtgtggcttgcaaaacaacggaagacttagatggaataacggacactaaaatggaacctctttcaatggcacgcactctttcatcttccacaccctcctctaccaaaggcaatggcttgaaatcggtggaatttaaatgcacaaactgtaaattgtgttgtgccgtggtgaacaacagaaaggaatcggtaatctccaaggaagtaactgccgaagccaaaagaacttgattagcaaataacttaccgttatttgtgataccaaatgcaactaactcagaactttctgcagaccagttgtcatcatcttctgctgatgtgttatggactctttttactctaaaatcacgtaccaattgaggaaacttggtaatttccattaactggccttccgcatccaattggcaaactgtaccatcgcgagtttcatacaccaagtggttataatcaaagtcacttcttagtaaaacgattttatcatagacctccacaatagttattaaagttggttgcgtaatatcctggatatccaaaagcgctattctagaaaggttatctgtgtcaagcaacacaccgacaatggaatcgttaataaatgcaacttgccttaaagagtcaacctcacttgtgaactcagatttggggaattcgcagactatacttggatgtttgccttttttcatttcttcgatacttgggacggctgcgaaaattagaacatctttgttgattgctgcatatatttcattcgaaaaactgcacgctacatccaatacatttcctggagtttcaaaatcacgatagtacattggaggagggacattagcaagagctagaggagtgatattcactgtccttccatcaacaacaagagaggtaccgttatcgaacggctctaatgtcggaccctgcgccatcttataagcgaaatcaacgatattgataaatccagcatcagaaaacatcaacgtgaagtccttttctgggtgccatttaacgtaggaaatgtcgctagcgtacaattcttgttttaaataccaatggtaattcttggacgtccacaactgaatgcggtttgccaatactacggctagtgcctctgagttactattccagcatacactttctaccttctcatctagaggtaatcttgtatcaaattcaccatgccttaaaccgttacgttcgaagaaaatcacatccactgaatcctcctcaccaaggtcggtttttctttgaatggacgcaatcaaagaaccttgtggtttccagcttaactggtgttccatcccagttactggctcagaagcactatccaattggccttcacgggaaaaaactctgaaagctcttctttttattgattttgtttcatcatcttcgtctggtacctcctctacagaagaaacagcaaaataatcacaatcccctctccaagaaattgtgatttcatgactgtccaatgcggttacatcaccagtatctaccatatagggcatggtcggatctcttaattggttacctaccaaacctgatgcctttaagctggctaatgcttctctttccatggcacgtgcacctttacctctgaattgtgtttcctttttaccccaaccaacggtgacgtgctttgaaatcttaagatcatctacctctaaatggtattccgatatgggttcgaacagtttacttagaactaccacgttacgatctttagtcaccatggccagcgtctcttcgtcataggaccactgcgcggctgcaattccgttgtctatagtacccataatttcaattaaagtttcagctgggtccaaactgacaggatcataagtggctgtaatgatatcaccttgttcaaagacaaagactaattggttaatatccgcaaaatgaacaaaagataataatttgtcgtcaaaagtctgaatgttgaatgaagccaacacattcctggaaccatccttcatgaattgttgcacttcaatagcaccaatatccgtagaaccgagtacacatgttatactgtcggataatgtatcaaataccgagtctaacaaagtgaaagataagtcatcttcatcgccttctgcagtagacgccgttggcttaaatttacccttattcaaggtaataagattacgcatatttgatcttagctcctgcctctttgacccactcttgtcatgttcaaccataagccattaggcatttgtactgtttcttgcctaggcatcgcttttcattactatggaaagaaaaaaaaatttgatcatcgtgttatacgtattagatcatgtgctccagccttgtcagcaatgcctctttcaattgaggaagttctgtattctgtagctcattgattctctgcatgtagtagtaattggccaggtccactacagtcactggttgatcattccctgaagattgcgcattttttgggattccgtttgcgaagatatctgtaaccattgttttgagccctctcagagatatgtcgcggcagtattgagggccatataattgcaccaacttgtgtgtcttgaactctactagtacgtcattatcaatgacgggatcttttaacagcgtttgcaaatcaaccgacttatctcgatgagctagagtttgttggcgctgcaaaactaattgcagcaacaataacacaacgtttgaggggcaatccatcgtacgaatcttgaagtcctatcagcagctaacgaagtagagaattaactgtaaatgcagaaacaaagcaggattacaccgtgatttgatgaaatagcacgttccctttgtttgtcttaaatcgcgtttccgcgatgctcgaaaaagaacacgagaggaaggttcatagagaagcagaaggaggaaccttttgatgctgctgtgcttatctgctcaggctacaacaggaactggaacatggaaaaatcgattgccaaaggtttaagcgacaaactatacgaaaaacggaaggctgccgccttggagttggaaaagttggtcaaacaatgcgttctagaaggggactatgatcgtattgacaagataatagacgaactatgcagagactatgcatacgctttgcatcagcccatggctagaaatgcaggattaatgggcttggctgccacagcaattgctttaggaataaacgatgttggccgttacttgaggaatattcttcctccagttctcgcatgttttggcgaccagaatgaccaagtaagattttatgcgtgtgagagtttgtacaatattgcaaagattgcgaagggtgaaatactggtctatttcaatgaaatatttgacgtactctgtaaaattagtgctgatacagaaaactcggtccgaggagcagctgaactattagatcggttgataaaagatattgttgctgaaagagcatccaattacataagcattgtaaataatggatcgcatggtttgcttccagccataaaaacggatccaatcagcggggatgtctaccaagaagaatatgagcaagataatcaattggcgttctctttaccaaaatttattcctttattaacagagagaatttacgccattaaccctgatacgcgtgtttttttagttgactggcttaaagtcttgctcaataccccaggactagagctcatatcgtatctaccatcatttcttggcgggttattcacgttcttgggcgattctcataaagatgtcagaacagttacacacacccttatggactcactacttcacgaagtcgaccgcatttcaaaattacaaactgaaattaaaatgaagagactggaaagactgaaaatgctggaagataaatacaataacagttctactccaacgaaaaaggccgatggtgcacttattgctgaaaagaagaaaactttaatgactgcattaggtgggttatccaaacctctgagtatggagactgatgataccaaattatctaatactaatgagacagatgatgaaagacacttgacaagccaggagcagctgctagatagcgaggcaactagccaagaacctcttcgcgatggcgaagaatatatacctggtcaagatatcaacctcaatttcccagaggttattaccgttcttgtgaacaatttggcatcatctgaggcagagattcaattgattgcattacactggattcaggttattttatccatttctccaaatgtgtttatccccttcctttcaaaaattctttctgtgcttttaaagctattgagcgattcggatccgcatattactgaaattgctcagctggtgaacggtcaattactctcattgtgcagctcatatgtgggaaaagagacagacgggaaaattgcatacgggccaatcgttaatagcttaactctacagtttttcgatagtaggattgatgccaagattgcctgcttggattggctcatcttaatttatcacaaggctccaaaccaaatcttgaaacataacgacagcatgttcctaactttgttgaagtcattatcaaatagagactcggtgctaatcgagaaagctttaagtctcttacagagtttatgttctgactcaaatgataattatttacgtcagtttcttcaagatttattaactttattcaagagagataccaaattggtgaaaactagagcaaactttatcatgagacagatatcttcccgtttatcaccagaacgtgtttataaagtaatttcttcgatattggacaattataacgacacaacgtttgtgaaaatgatgattcagattttaagtacaaacttaataacttcaccggagatgtcgtcgttaagaaacaaacttagaacttgtgaagacggtatgtttttcaatagtttattcaaatcttggtgtcccaaccccgtgtccgtgatatccttatgttttgtagcagaaaattatgagttagcttacacagtgttacaaacttacgcgaactacgagttgaagttaaatgatctagtgcagttggatattttgattcagttgttcgaatcacccgttttcacaaggatgcggttgcaacttttagaacaacagaaacatccgtttctgcataagtgtctatttggtatactgatgattataccacagtcaaaggcatttgaaacattgaaccgcagattgaatagtttgaacatatggacatcccaatcttatgtcatgaacaactatataagacaaagggagaatagtaacttttgtgattccaattctgatatctcgcaaaggtccgttagccaaagtaaactacatttccaggaactaattaatcattttaaggccgtttcagaagaagatgaatattcatcagatatgataaggcttgaccatggtgctaacaataaatcacttctgcttggaagttttttggacggtattgacgaagataaacaagaaattgtcacaccaatctcgcccatgaatgaagctattaacgaggagatggaatctcccaacgataatagttctgtcatattaaaagatagtggcagtctgccattcaaccgcaatgtatccgataaattaaaaaaataactacccattacctgattgaaagcatctttggttaagaaatggacctgacatgctacataaatagatacgtaaacagatatttaaccgagacacataagatgacctattgcaacaactcatccctgtaatgtgtttgaaagttaacccttttaatttcgcgacggatctgcgtattaatggcatttttctccaattgttgcattttcttcatacccttcttatattgcttctcggtaacaccactgaccatccttctatcagcagctgtaatcgttcttctgctttcgttagggtttggctgcgaaggtaaattttgtctatagtacctctggcccgcacgatgacctagcctagcgcctgttggcaaggtaagttctaaaccagattcatcaatagatacggtggtatagtttgcattaatgtcattttcggatgagaccaacgtgatatctacctccccatcttcttcatcatttttggccccatagacagatgaaagcttggaagtaattgctctgtcattctgaagatttttgctaatagagtgatcatcgtaagtaaaatcgtaaaatggggcgaaaagctgacgctcctcctttgtttcatatggcagcctgcaatgacgcttagaagccatatgcgctcttatactttccaaaccggagccatgaaagttacaacacagacagttatgatcaataacaatcatttttattaaaaactctagtaaaccgtttagatcaatcaaatatgacctttcaggtatgaaaagaccatgctcgctaaacatatgtttgacatttctttccacttctttattgtctttcccgcaatatatacattccgtgatggtaatcttttcattttctttatcacttggcttatccgctatatctagttcctcatcactagtagcatactcataattagagtcactagtgaaaccgtattcagagacagtatcttcaccataatctgtattcgtgttttctgttcctactgtcaaattagataattgtgaagatattgatccagaaggggacaccgatctattctgtttttctttagcaatatccctgtctttcctcttcaataagttcgtaccaacttttcttcctctctttgacttgatcggtttcttctgtttctgaggcaaagcgttactttggttcataacaggctttagaacagggaaaccaaactcatcaacctgattttcagcttgttccttttctgaaatttgcaatttctcagcaaactgttccgcaccaattggcggcaggttggcaattcttctctttaagttgtacctgtgccattcggtcttcatgtgatatctttgcaaatcactagtcttgaactgaataacacaacagttgcatgtaaagaaagtagagctcatctttcaaaatgtaaattctgctgtttttaagctgctataacccaataatgataaggtgattgtaagatgaattgtacaactgtgttgccaccgtcttgtgactattgcatatgactaagtcgttttattctctttcgtgagtggcaattttgaagaaacgacccaaaaaaaaaggacagaattctacaacacctgtacctccaaaaaacccatttcttttctgtttttactgaattgtaattcgcgcttgtctattcgtcattctgaaaaatttcacgcaaaacaactgatgacagatcttgaccatagcatagcatgaaggtgcaggaacatgaggcaggagcaccctacggggcaccgcgaaaatagctgtgtgaaagtgctatgcgatacacatataattaatggttattagatgcgcgcatttaacattttccctaactcaagtaatagctgaaataccacgaacaaaagtgtaaattagggtatgtaccaagttctattcgaatttaaaggttatgaggtacaggaaggctgaaaaatgaaaacttcgagatgaaataatccacgtcgaaagtaatgctgaaaacacaagtagctctggattcaaatcataaggacgtacagaagtgttgctgacaaatcgcttctttttgatattagaatttcattcaatgaacaacggattgaagaattgtcgtgtcgacaggattgtacattttaccaggactgaggaatgaattcaacggctttgccgaacaaatcacggcataacctgcagaataacataacaacatagcgcttattatcattgcgtatgctggctgaaacgaacctttcactgaatcagctcatatcgcatggacggaataacaggtataaaaaatccacgagttatcaacctcattctctttaaaattggaatccaatcaaccgaattcatttgtactaacaacgtttcctattattgcagataaaatggctcacgaaaacgtctggttctctcacccaagaagatacggtaaaggctcccgtcaatgtcgtgtttgttcttcccacaccggtttgatcagaaagtacggcttaaacatctgtcgtcaatgtttcagagaaaaagctaacgacattggtttcaacaaattcagataagccatcataaataaacaatgacgaatatataaatactatatgtatacatatatcaaactgcctttgtactttttatggtcctattgctccccgaatctttagatcctatatgtgctcttgagtatcgttggaggattcgtcaactcgaggtacgagatatgctttgtctcttccttgtattcgcttgctgatattccgtaccctagatttcttactttcgaaatacattacccggatcaattccattattttcgcctttcaaaaaatttcccggttgtataaaaaggcaggacttcgacagtcaacaacaattttgagtatatttaccacattttttctgatttttttttaagagggtgaatcaaaaatttattttttacacggaaacgatgccacagttgactgaacctgtcttctaacagtagttaattgccagtatttcaaacaagatttgaaatacgagtttcccagaataatttatttggacaggataggaagtccgatttctgtgttgtctcaaacgaggcgatagaattgggatgtcgaagaaagtctacattactcatatatttacgtactgtctcttgcaggtaaaaagtcttgaagatcagtttcaatattgaaactaacaaatttagttagtttctgtacttagtccgaggtatgtatgctaagattagaggatggtaaaaaaatcagctatgaaaatacatgtacgtacgttgtcgtgcaacacaaccccttcactttctatttcactctgattcagaactattattcagcttaggaggcgcggaaatctcgaagtctttcattggttgacgaacgggagctacaaacagcgtcgacttgaatgccccgacatcttcgatcaactggccagttggatacttagcggtgtccaattcattttcattgagctctttgtttccacttgagatttcaaatgtagaatcaacttcgatgcgttctcgctcattatataattctcataaaaatctatcatttgctgctttgtaatgttagcaacgagcttagcctttttttgacgatgtgtgaaattgtaatcacctaagtaaattgctgctgtgtatctggcgctttcctcggccatattcttgaatttttgcaatagactgttgcataacgcctctttgtgtttttcaaagtcctcttctggcatatccctcaaaacctggccaaaagtttcataaaaattgtttattctccattctagatatggcgtggtatgttctgactgaatcaagatcctaatgttcgctgtaccgtgattgttcaaactcgaactaaaaacaacgtagcccaattgctcttttgttcttaaggtatcaaaacatggctcgtgaatcaattgcgcaaataatccgctgagggcagataggtcttctgaatagacatctagctgggtgacatgttgaatacatgagttaacattctgggagtctttcaaagcagtttcatatctgaaagttttgcctttaggaagtaagtaggatctcaaccggttgttagaaacctgcagattatgaatgttgtttggaatcaaagacttgatcagagaatccacctccaatgcttcttcatgttttatgtttccgtggattaaagtttcaaaataaacgccttcgtaaatggtgggtatgaagttgatcaattgttcaaaggtcaatttttcaaagacttgtaatttttctgcagttgaccaagaacgttcatttattatagcattgtagtaattcgacatttgtgaataaggaacttcatataaaaggtttttcaagtgacgtatggtcttatctttcaaaatctcaaaacgatccttcttaggttcgaatgaattaacgccttgtaaaaaccttgttaatagaatgatcaatttttcgttgaacccagacgcggtaatggcgaggccttgattagttttattgaatgatatacgaagatcggcacaagcagcatcatattgtacatctttcaaggcatcgttggccagctgagtgtatagcgtagaaagcatactattaatgatgcttgcatgcgtatgtggaagtttaaaagacaagtaaatgtagcctcgtggttgccagaatcggtcgtccttcttgtaccataatttgctgacgtcatcggataataacaaaacaggttcatctaatggttttataccgtcaattttatcaaccttgaaatttgttgaaacgaattcatttggacgtggcaaagtcagagcagggttcaaacctggcgatttcatgttttttattaaatctgccggataatctaccactttatacgcagtaccataccatttttcagcagaatctgtttctaaactccttgagatcagagtaacacgagaattttccgggaccagagcgtccgtatattgggtaagcaaatcaggttcatatttcgttaacaaacccatggctaaaattctgctaacaggaatgtaatccttttccaagcattttgccaatgatgaaactgtggaagatgggctaccagcttgcttaaacttgaaggtagcattagagatatcttgcagttcattgaatatccatttttgaggtagtgagtttttcaacatttcaatatactggaagatcaagacaataacatcgcgatagtgtgtcaacccgttgtctgttaaatctatatcgacagcaaaaaaagcatttcctttggacacagtatgcccaccagcagatagctcattggcccagcccaattttttcaaatgtgctagtaatgaaccggacccttcatggccgattaaatgacttaatatcctcggtggcttggactcccaatgttcctccatatcagggacagtgaaagagatttctagttttttcaaatctttcacaggacggacttgaattattttttgcaaatgctcaggctgcataataggttccgcataaaggggtacttcacgaccgttattggctacatccttgaagagatcataagtccaatcagagagagtatcaaggtcttctctaccaagaatacatagcttcattaggttagcggagtaaaaattcttatggaattttaacagttcatctctaacatttagtccattttcctttggcaatgtgcccaaagtttcgatgtttcctgtagaaaatttgtgatatggatgttttgtattggtcaaagacttgtctaattggtaaattctccaaatatcattctgtaagttctttttgttttcgctgttaacggcgttgatctctttatcagtagagtccttgttgaaaagaggacaagagaaaaaccctgaaaacctgtctagcgcaccaaataaatgttggtgattaacctcaaaaaaataatttgtgttttgcgatgctgtgtaggcattggatgaaccaccgtgcttgcttaaatagctcgagtattcgttttcgtctggaaatttctcagagcccatgaataaaagatgctcgcagaaatgcgccaatccaggtaggttctttggatcttcaaaggcgccaatattgacgtctagcgacgctgctgctttatctgcttttgggtcctggatcaacagagccttcagcttattaggtagctcaataaaccgatacgatctttcgtctaaatccggctttaaaaagtccagattgaatgtcttaaaattggatgtcatattataaggatttgttgtgtaatagcgtgataagcacgtgaatggcttgaagcgtcttacggtgaaattgagactgataggtgagaggtgaaccaattgagtgaggagtggtttagttacaaatgcagaagaagaagctaaaagagatacgcccatacagagcaatatcaaaatgagcaagaatgaggtcttccgaatggttggttctgacttactatttgatttcactttctctgattcattcaggaagaaaagggcgaagtcctcgaaatgaaaatttcaacatcattaacagaccggcgcgcgcctttacaatttagtatgtacgccaccaataaaagctgcttaaacaataagctagaaagcccaaagggtgttaaatagtacagcgaacccttcagcaacggtacatcaacaaccccttgaaaagaatagagacaatacagctacagtcatccccttctcttgtatttttggccacaattgattgtattacatcatattttgcctgtgcgcttcttctatcttttccgcataaactaggggaaacgcgatgaagaaatggattggctgaaaaatacaacaattgtagtgttattcagtcattcaactgacaaaagtaacaaacacaagaaacgtcaagtccagtgcaatatgcgaaagaacactttagatatggtcactataggtatcgcatgccttgtgggagtctacacgggcacgagatttttcgagcccattgttatcgatagattgcgtaaggatggaaacttgagaacggacattcccatcccagaatacgacgaggacggaaatctgttaaaggtcacgccgtctttatcatccacaccagctgcaccacctacaccacctacacctcctactccaccacaacagtaaggaagcgtactagaaaatacctctatactttcttttcctgtatatagcatcaatagtaaagccattataacgttacaaaaacctattacccggaaaattactatttatagaagcattggacccatgcaccacatgcattaggacccattatttcttttttacaatttttccgttaatttttcacgaatttttcaccgtttataaacactctcgaacttataaacaaagggatgataaatagatttcgccagttgttaatacacacagggtcaaagctcacagcactactacactcgttcaacactcgttatatattatcatgcgtgccaccactttattatcttcagtcgtttctttggcattgttgtcgaaggaagtcttagcaacacctccagcttgtttattggcctgtgttgcgcaagtcggcaaatcctcttccacatgtgactctttgaatcaagtcacctgttactgtgaacacgaaaactccgccgtcaagaaatgtctagactccatctgcccaaacaatgacgctgatgctgcttattctgctttcaagagttcttgttccgaacaaaatgcttcattgggcgattccagcagcagtgcctcctcatccgcttcttcatccagcaaggcctcttcttctaccaaggcttcttccagtagcgcttcctcctctaccaaggcttcttccagtagcgcttcctcctctactaaagcttcttccagcagcgctgccccatcttctagcaaggcttcttccaccgaatcctcttcttcctcttcttcttccaccaaggctccttccagtgaagaatcctcttccacttatgtctcttcgagcaagcaagcttcctccactagcgaggctcactcttccagtgctgcctcttcgaccgtgtcccaagaaacagtctcctctgctctaccaacttctaccgccgttatttctactttctctgaaggttctggtaatgttctagaggcaggaaaatccgttttcattgctgctgttgccgctatgttaatctaattatctatcactttatttctaatgggttaaggtatctatcttttatatttcttatttcctcttcttatatgatgcggatgattttatttcttcaaaaaacattttaaaactcctctttatttcgttatgttccagttcactacgacttcttttctcttaaagagcaaataaaagtatataaatctatattaaatgaaaatcaaaaaaatattttttcgatcagctccttgttcttttcatttcaaagttttttacattgttacacatgtgcatgaatatatatgtttgcagaatatttttggcgacgcttaactcgccatttcagtatatgtcggtggcggtacatatctgggcagagcttcagcttcaacgtgctctctaacttgacaaaagatctgaacaggatcaatgtttacttcagattgcttcctaattccattgattccccattctatcagtagctgtaaactgaatgttctttttatcgtgcatgtcttgaaactatacaacctattgccgcgatgtctatagtcttcttcattaaataccaactttcttaaaatggggtgatcctttaaccgtaattcacattcaaacatagaaccatcaaaattttctcgtatttcgtttaagtccaaaagaggtttattggatttgagctgattcaaatcaatctcgattagcttcaaagaagagtaattgccgttcgctattccctgagataaatatgttgtagtctctagcaagttcagttgtagtttaagtggggtaatttgcattttgctcaaacttgctatattcccctccatgactacatagaccttgtcaaaattttggctgccagacctaaacaagtagtctttcctgtatatttgcttcaaatctcgacttctaacctctattctcatattgctttccccatcaggcaaccccattttataagtagatgggaaaactttcataccatttactaggcgagtagattgtcttgttgatgtgactgatgataccggtctcgatctaatgtcgccgttttctatcaatatagaattagcttgagaaaagttcctgtcactttttatatatccgactccattaacgactttgacgtcctttgatggcacctttaaatttgaactattgaaaaattcattgttggtgaccatactatttcctctactattgttactgaaggcattaagttcttcattgtcatcttcatcaggttctataataagatcttttggctcaggtataaattcgaacgtctcgatttcccttatcagtttatggaatggcttaaaccaagatgaagatttccctagctctaattgaacttgcaccatatatataacttttccaaaagagtaaaaatacaaatccagattatcgattttattaaattcttgccaatgactattgaacgtaggtgggagtcgggcattacttcttgtcacaaacgctactgtctttgccgtatgatttttcagacattcaggctttctgggaaacttgtcaaattgaaagctataattatatgaacctggtttaactttgaacggcttggaggagccatcaagagcattccatacattatctggagggaaaactctctgttcgaatttcattaatgtatgaaaggatttgttgtcttggcccggcatcatcatgccattctgttgaaacatgtactcttgatcaatttttgttaaggtctctgagaatccttttagaatgacggaaattttccttatagatagcgcttttgttaactgaagactaactatccctgacatttgatcattagagctataaaactccccgttgtacggtgggtttaaggatattgaaatttttggagccatggtttgacaaactgtatggttctcaaccttctctaatcaaaagcagaatcttaaatataaacactcacagaatatccgttggtcaatgaagtaattctcctttgtactggctgctttttctcctctagtttatgtaattctacttttggatgggtgcgactgcttttaattgattgagtggcggtgttagaagggctgtagagtcgaaggcttgtttctctcttacgcacctcttgtgaaaagggcgtgcaccttccccaggaccctctctcaccctcaacccgcattttgctgagaattttcaccaaggccctaggtgatattagattccacctgactaattgcattacagccgacccaaggcaatatcagtttaataaaatatcatgtatctcaccctcttcttggtattagtaaagagacgcctgatcttgtaacagtggtgaagattgtactagagcagaatcaagaatttaaaaagtgtaaaggcaaggcagaggcgatgtacataaaacttcgaagtaagaaatatttaatagttctcgccacatcactatgcagctatataaaaactactataaacgtttgttttgttccttacgcacaatatccttgcctagaaatcgtttttgaaatttaaatttttattaccatttatttgattcgccttcagaaaaatatggaagagtgcatatttaaaaaggactatttcagcatatagtaaaagtcaggttatttgtttatttgcgatatcagagtaacttaaactaactatgcagggcacttttaaaaggttttaccatcccacgcttacgcggatgtccttcttggataaattcctcaagcctatgatggcaacggcttccccaaaggaataccagatcaaacaactggtcaagccaataggcttaacacaagcaccaaggaaaagcaccaaatactcccaggggaactctttgagggatatgtttgattcggaaaagacaaaccacagagttaaagagttggccgttgaattcagcaaatctggactttatgacgtgcaagtcttccaaaagacaaaggggaaattgtttatagctccagtttcatattggaaagaagataaagctttgttttttcctcatttgataggaacggcaatggatggtacgaaacaacagaatatcgaggatatgttaaggggtaaaaccagtatagtgaggttatttagtacagcatctggcgataagttgagtagttcatacttccaaggaatcgtagacgataacaaaaaaactgactacttgactgaagctgatgcgcgtttaagtttaaatgacagtaacgtccaaatcatcgaggtcaatcttgtagaaaacgctgtgaaaagtgctctagtgaaaacgcttgctcgttgggccaatcgcgttccatcctggcgccagccattttatttcgaatgttctagaggccaatggccattttccgtcagggaagagctcttttgcaataatgtcttttctggatacgtctttcttgtggaccagcagttaaaaattaggtgggcagcttgcggggaggctactccatctgaaaaggaagcattgtggaagtttgccaaacgtctgtgaagttgacgctttgtgcggcggccaacaagggatgggcggctatttggcgatcgtgttcattccccaaactaacacgaagagcatgagagagaaaaaacaaaagtgcttgaaacaggtaagacgtttatcattgatatcaccaaagaaatatataatgccggattctatttttgaacagccctttgtttactgtggtgtttgccacagaagaacatcgcatggagatccattgaggctgacctcatgtgctcatatcctctgttcgcagcattctccattaacatcaaaggtgtgtcctatatgccgttcgagcgatatctccatcattaaccttgtggaatctaaacagctgcctaccgacattaggattttttttgagccactgcccccacttttggagtcgttatataatgtttcccaattccaactgaatgggctttcgaaacagtgtcaatactatcaaaatcattgtttaaagttgagagaaaaatgtgcaagacaacagcagctgctatatcaggccaaaatagagttggattctatggcgattcttaagaaaagaatacaggaattagagtcagttttgaatcataacaatgtttcttcgatgtcagttggtgtgctaccaacaagaaatagccatcaaaatcattaccagccccctccaaccgttgatctgacagttgatgataatagtttagaagaattcgaagccaaatcctttattaaaaagttgaaaaaaaactcttctttgagaaattcttcaaaaaataacaatggaactgtcactccctctacaagtggtcgtgtaaataaaaaccagcctctctttatggagacattgaataatcctaatagaaatagcattcctcctcctggaatgaacccaaacgcaaatagtaatctacctaatatttcgactattgcagaatcaaccaatctgaacagattttcgttctctcctgtgcgtgttgcaaaaggcttcgatggaaagttgccaaatcttgacatcctcacgaataatggctctgtatcttccaaaaatatatcaagattatcttcagcttctctccaaccctcttcgcctctatcttcatcatcaaataggcttattttaccaaatagtaacctcaaagaattgcatcattcaaatacacctttaacaagtacctcgacgcagtttccctcagctttagaaaaattaaaaataacaaggaagagaaataatactatcagcggttcgaatagaataacacacaacttgagctcacacgtaagaagcagtggtcttgccttttcatcttcatcgaactcattgcaacaaagtaaactgccgaaatcaaatatactaaagcggtccaattcaactcagcaactgactaatacacatttgaagagtgataatcatctgccacctcgctcaagtaatactgtgttgggtagtagcaagaaaaacaataagtttagaaggattaggtaaataggtgtaaggattccccgtgacgaaaacagccttcagaatagatagagtatgttactgtattataaaagttattctattttcttatgtgttactatatatggtattattttagaagaaatttgtcgaattatgttcttcttagatccttctttcccgccgtctcaatacgaaggcacaaggagaggattatgaatatatgaaaagaaaattgtacaaataaataaaacgatgatatgcgcacctaggaatagcaaagaacacactctaaaacgtctcaaccaagcacgctatgtacacacatctatccttcaaacttatgggggtgttttaaaaagcacctgactttttcaattgaacatagcaggcaacaaatggaacagcaaatccaatagcgaagaacccgaaatgagataaggcgtaaggtgtctttcttcctttgactttgaatgggatattttcatacacaccgtctttgaagtgtactgacctcttcatgataataggtctggtcatgatattgctacttctcttagctgtcgttctaatcatctgttggcacaacattgcgtaatggaaatggataacttttctgtttagtttgctctgtggctctatctagaaaattaaaggatacaaaactaattaaccattcttataaatcactaagccagcacaatggtttctactgctgtcagcctttattttcaatttttcttagtcccctagcttttccgtaaacaccgaacacttctctcgtatgattggtgcaaaccgtttggtgaaaaaaagcacatttgcatatacaaaaaattaacaaatctatcatataataattaagatatagagttcatgatccttgtgccattgatcaagccatcggcgatgatgataaaccttttattgataccttttttacctagtattttttgcaaatgcttcattatagctatttcacccattgttacacctccgaggaatactacgagtgcaatatcctctgcagcatgaaatgtcccattagatccgtctatggaccgtctattattgctcttgatgcttgcattgatcttttttgtaatggttcccgggacccatatactctcttcgatcgcatgtgagtctccatataactgttcaattaaatcctccgtttgagaaactctaggttctcttgacagtataaaaggctgctgcgaggaataattatggaacaagatagacctatcatataacatctgaaccagtctcattgtcaagggcactacaccactgtaagcaaaagtggcttccgagaagtcatcgttctcatttgtgattttatcggcagcatgctcgtcttctatgggtactgtattgaaccattgtgaaatataacggtattctttctgtaatcttgttgacttacttgttgtaatatgcaaatcagtttttcccgttttgctagtgaaaaatcctaactcagccaatgattcaagttgaaagcatttttcaatgccccaagagtcgatcataaaggttcttagatattcataatccttttctcgaagtgaatttttacaaagagacaataaacagattaatctgagaatcttcttttgatcaacctcgtactggtactgcaactcgagtataatatcttcaatgtcgttattaagtgtatttcccatcaaaatttccagctctaactctaagattttattgaaagatccgtactcttcagtctctaccactttcaaaacgtcggatgataaggttgtgtgatttttcaaaaaagcttgcctttgttgcaaagaacctaaggaatcaacgaattctttgatttcatgtacgctctcggctttatgccttgtatcatattgcgtttgtagttcctttgccaatttatttaactgcggcccaatcgacccaaaatttaaaaatttcaaatcattccatattttatcttccttataattgaagttcatgtctttctcctttatctttatgccagaattgaattcatatagatcatctagtattcctgcatacgtaagttgtgtcaacaatggcgttataggatcggtattcctttccaagataatcaagtccatttctagtccacagttggttcgttcaccataaagcgtacccttgatgaataaatcattctctgtttgatgctcatcgattcgtttcttcaaaagatggctacatctcttagacagattacctatcgacacaacatttgttatgatactattagtttcaaaaatcaagctctgcaacgaattgaccatatcatcaaccagtattgactctgtggcactctgcaaagaacgtaagttgggataatacatgtttacattttccatgttataaagggaatgagtcaatagaacattttcatcaatctgtgggaagggcaagagatcccaagggtaaagggtatattcgttcgatagctcctttaactgagattcaatgacgttagggaaatgtgttttttttgaattcaaatcgaaaccatccttttgccattgctctgtatcctccaaagtattttggaaagacggtttccatcgacagtatattatatgcaaagatgataaattgtgcttttgagcagcatcaagcagttgtggagggagtcggagagatgttctgacatcaataagaaaaataagatccatttgcggaacgctgcctaaggcactcggtaaatcgtcacttagctgatcatcgagtaacgtaattttccttacaggagttgattgagtcaaatcttggaaagttagcaaactattgagtactggcaatacacttggttgaaccacaagaacttcatcattttgagatatctcatttaaggtagcacatagtccatcggcatttgttaatgaaaatttcttagtattccaaaatctattcatcgtgaaatgatttgataaagttggagatgggcaatatcagctttttcttcctttctcgaattttctatcttttaactaattaacatataactagttccaatttgctaacctttatgatattttatttatgtatgttcgtgtgaagtgattaatatattatacaaaatgaccggagttcagtataatttctatctactattattgagcacacaaaggaaaagaattgactatgaacaagcttacgaagatgaaccgcttcttagagcaaactcttcataataagagagcatttctggagtaatgcccctagcaattcctttaaaagctttctcaaaatgacgtaattccacttttgcgacatctaaatcttccattatggcagccaagcccgcttcttgacaaagcagcacaacttcagctccggaataaccttctgtacggtctgccaattcatgaagatcgactccagactcttctgtattaaatttctttgtgcacttctttaagatttccaagcgggcgtttacgtctggagggccaacgtaaatgtgtctatctaacctaccaggccttagaagagcagcatctatttcatcaggtctattcgtcgccgctacaataactacaccctttaactcttcaacaccatcaatctcattgagtaaagatgtgagcacgtgattagctgcagaggtggaactcccgtctctatcaggagataatgcatcgatttcatcaaagaagataatacttggagctgcagagcgtgctttgcggaaaatttctcttatagctctttcggattcccctacatacttgttaaaaatttcaggccctttcacagctaagaagttgatacccgattctgtagcgagagcttttgcggttaatgtcttggagcaacctggcggcccgtaaagtaatacaccttttggtgcagaaattcccagcctggcaaaagtctccgaagcctccaaaggcaactgtatcatttctttcatctttgttttaagctcttcttggccgccaatgtcagaccaataaacttttggcatttctaagaagatttctctcattgcgctgggtctgatatcaaccatggcgctctccacatctttcaatgtaacttttagggaaaacttgtcaatattggcgtctgttcctagtcctcgttgtatcgtcttcataactgattctctgcagagagcagttaaatcagcaccaacatagccatgcgttttagaagcaatgtacttgatcgcttcagaatctaatacgtgacgatccgaggacattcttgagaattgcttagttaaaatgtcaaatctggcatcaacgtctggtataccaatttctacttcttggtcaaacctgccaggtctcctgagagcagggtcgacagaattaggcctgtttgtagcagcaattaccaccactttacctgcagcgcccatgccatccattagggtaagcaatgtagccacgactctgctctcaacttcaccggagtcatcgtttgctctatttggtgctattgaatcaatttcgtcaatgaaaataatggaaggctggtacttccttgcttcattaaaaatatctcttaatgccgcttccgtttcaccaagatatttggagacgattgaggggccattaatggttaggacgtgtgcgttggacgtatttgctacaactctcaaaagcatagttttaccagtacctgggggtccgtgaagaagtatacctcgagggggagaaacaccaaagctactaaatagcgtcggttgatgaagaggtatttcaatagcacttttcagtgattcaatctccttgtctaagccgcccactgctgcataggataagggctccggaagattgtatttacgatttgcctgggtttctttcgaaaaagttatatgtgtggagccttttctgaatataaaaggtggagatagataaaacaggttatctaatccaccgtacatatcgtccatgttaagatctagttggctgacgtcgggaagcgaatcatcgctcgcatctgtaattacgacatcaatgctttcatcacctgcttttgtttttaagttttgaaaaatcattccaggcattataacgccactatcatccagtagcttttgaattactttttcctccatacattccaaaatattatatccttgtaaggaccccacggtaaccttagtggcataaggtggttgcacctgggctttctttaattctagacgatcaccaaggataaggttcccaacagatcgtatagttgtggaaagggtgataacattaacaggatgtacttcttcatcacccgctctagctattactaaaataccattttcgcctatcttaccgacagtacaaaatgatcccggatttatctcaagcgaggataatacgttaggatgaatatatgctgtgcatgtttccttgccatgatctttagaaggatgtggtctggtaataaattcagcaggcaatttaaatttggatgcttttgcatcagcactattagaacttgccgatgatttctttttggaaccggaagaactagatttaggagccattttcctttctatgattgggcaattttgagaatgggcaatgttgagaattcaattgtatattgttcgcatattagtttatgtgatgaggcaatataaaattttcttacaatagtccgcccgttgcttacatgaaagaaaaaaaaaataaagatggatcgaagtggacttaaaaactatgtatacgtgtgtgtgtgtgtgtgcaataagagttcgaaaacattaacttttataaacatgactcacattgagaataaatgagctctctataaatacaaacttgcggcgaaaacaatatctctcttaatcaactcttgagccctgctcatcttcatatgtaatgtggaattaccaataataatagaggcagtcttaacttcgcggcaaatttcgtctagccaagtgataactctgactacagtaccttcagcctcggggctcatttccatgatttctttgaatgataaaccacgggcccactcatacaccacattcatcatggcaaacctttttctgtccaaaaactcagcttcatcctgagttaatggaatctgatgcgtattgaaaacacaaagcattttcttgtaaatttcctcaattctttgtttaccctttgctagccttggtgtgacaataggaggctcctcttccctggttttcccctcataaacaaatactgataataaggctacaatctcttcaggttcaaagcttcctaaaaagttgtctaaaattaattcagttaaaactaactcataaccagaattaatttcacatgccactctaccttttaacagcacgttgtggttttggtcgataaattcagtgtctttcagaacagccaatctcttttcataatcgggtagtaagctcagattttggtcagacatcaaatggtacaattcttcaattttctttttaattacatgcgccttaaacttgggaacaatgtgttggcttaggttgggacatttaatgctttttagtttgaatatctcatcccttatatttgtacggtctaacaatatttggtgaatttttaaaccttgcttttcaatgttaattgcttcttttagcgttttgccgtccaaaatgttatttgtttcagcgttaaactcgttcaaagcggcaacatcctttttaatcacttttcccaagggtgcggcaaacttgcgtttagtgatcacttcaatagccgtcacaggaacttcttccatataaaaatcagtcttctggaatttagggaagttccttcttctgtatccatccgcttttggaaagtatattaaatgatttggctcaccatttgggagtttgtatggttttgtgaacgtcataatgacacaaacagcatccttcagagaaactttaaatacaaatcctaatttcaagcaatcattggggtccctaaaagcaacgagtctgccctctttcaagatatgcaatatcgaaggcgatttaaccatttcttgcattaggttgactgttgcctccttatatgccagcatcaattccaaaaacttttcgatatcattatcacagatttcacaacttttgtactctatggtttgtaattcctcttgtaatactttgatttgtttttcatgttcaggttgtaaagtttctttggcattctcactaaaagaatacttgatcatttcttcaactctcaacgcctcaattcttaaaagatttaatatcatattgtatgttaatctaaactgagactgcaacctcgtcggaacacccatcgttacttctttgaacgtagcaatagataaaggactattatatgccatcacaatgactgtaccagtggaatccaagccccttctaccagctctaccagccatttgggtaaactcacctggagtcagttctcttaatccattaccatcatgtttacggatgctgctaaagataactgttcttgtgggaaggttcaaacccatggcaaaagtttctgttgcaaataaaactttgataaaacccttggaaaataatatttcgatcaactccttgacaatgggcaatagccccccatgatgaacagctataccacgttcaagtaatgatctggttttaagaatttgaggcaaatctctatcctcttttttcaaacgagtaatcgacttctcaataaacatgtggatttgtgatttttccttattgttgcagaagttaattccctccaaccagtcagcatattcctcgcacctctttttactaaatacgaaaacaaccattggtagaagctctcttttccttaggtaattgacaatttcgggccatgtttttttcgaaggaccatcttgagtgaaaaacttacgcttgttggagccaattgcgccagcacctcttgaacctccacggttggcacctccacgtgttgaattaccacggcctcctcttccatctcgagtattggatccaccacggccccctcttgctgtggatccacctctcccgttgtcagtttttgaaggagccccttttgcactctccccatttagaatctctttatgtttcctgaaattagcttctaaaaattctgaattttgattaataaccggtatcagttcctttttagcccatatatttatttccaatggaacgggtctttttggtgtggaaatgacataaatatttttttgcttagttcttccaatccaattagcaaactcataagtgttaggaacggtggcagataataagataaacttgacatgctgtggaagcataataataacttcttcccagacaacaccacggtcttgatcattaacgtagtgaacttcatcgaaaatgacaaactctacatctctgatcaaatcggcacctctataaagcattgatcttaaaatttcggtcgtcataatcaaacagttagcatccggattaatttgcacatcaccagtaatcaacccaatattaacatcgtcaaaagtttctttaaagtctcggaatttttgattggataaggctttaatgggtgatgtatatatagttttagtcatgtttctatgtgccatggcaattgcgtattctgcaacaacagttttaccagcagatgtgtgggcggcaacaaatacggaatcaccttgttcgagatgatagacggcttccttttgaaatgtatccaattcaaaaggccacgatctagcggggtttggaatcaactcatcgaaattttcgatcttatggttcaaatcaacaacatgggcccattcctttttaacaggaacacttttcgaaactggtttagttctgccaaagtctattccaattggtaatagttcatcgatttcggcatcatcagcattatcggcagtcgtttcttcagtggcttcctccataatttcttcagaaattgacttggcagatttttcctcctcttttaactttgcctcgttcgcctcaatccttatgtctaattcattatctatctcatttagctgtttcaattctttgaactgtccgttttgatcctcattttcagctggagaatccatcggcttaatgcctctattcataccctctggaatatcgaataaaccttgaccatccttgtgtaacaatttagtagcgttggccattgtagaagatccattttgttctgaatctgtcttgacagatttcatgggaattccgcctggtgtgaaaggcaattgcgctgtagaaccccttactgagttttggttatggttgatacttctcgtaatcgacagtgaatttgatgcattggcatttgcaacttccttcaaatcaacctcttctttgtagcctgaaattttaccttctaacccagttcttttaaactggtatgatgttctattaattgggtccgggactttcagcaattccttgtaatctagtttaccagagcaatcttctggagaagacgtatgtggaacgtcttggaccatgtccaacaagctccaaggaagagcattagaaggtctcaaaaatctatcctttatgatatcatttgcatgctttggttcatcggtgctctcaaaatctaatttagtaatgcgatcttcgaaaagctctacgtctgcgttgttagtgatttcttttaacgattgatataattcctgtatggaactgctactgaatccctcagacatataaattagtattagtacagtaaattttgtgagttaggttgttcatatcggaaagaactatgtggcaatgtattatagtttctgcgttgacttttaaattgatgaacaggttaggttgtctttcaatacttcgtccgtcgtgatatcattaactaaagttatgccatccgatgggcgttctgagacaagaggaaatttttattctaattattcattattatatagattatgaattgatctatatgatgagatcatgtgcaaatgattaaccttgttaggtttatgtttttttttgttttaaatttgtgagctttataatgttacaaccgatatgaaaatgaaaaattacctgttattcctttttcaaacctctatccgttcctaagatcttttctatctttattttttttccttccctttttgtatatgagcttaagattaccacttaattaatcaaaatatcaaaatggtgctcattcttctcagtcgttgaagataatcaaattcaaaattcagtcactcttcttcactttcgctgctaacatcgtcatctgaagatgaggaaaacccgttgtgtgcagcgctttgaatttggcctggggagccgttttggctcagaggtgaagcactgtctaagatagctagtttattttttatcttttctatctgcctactctgctcctcttggcttaatgccttagatcttctctttctgcttcccgcacttgtaggcgacaaggacgaagcatctcgcgtaacacctgaagtaccgtccaaaccgttagaagcaccggatgagctttcatattgtctaaagaaagtgttgtacaatgttaagatggtgtgattatctaaagtgtcgaggtcaagttctacttcatcgtcttcagaaatattgggcatggatttttttattatgtcgattgctctttctaatttggaagttggtaaatcattgatcctctctgtaatgatacgtttcatatcatatgtcactactgttttcaatttattctttttatctcgccttcctttcgaagaagcgttcttagacccactccttcccttcgatcttttgccgcgtttctttgatccacgtgctaagcgcctctcttttcttattttttccagttcttgcttttttaattgttgcaactccactttcatccgagcaagttgttcttccaaatactggatggctggatttgtaattatagtttcatcgatgtcagactctgaatactcagattcataatcgtcgtagtcgccttgggtcctcgaatcttcatcggaatcgtagtcatccaaattaggcctatccgcccatttggaattgaaaacttcctctagacgatgacccatcatattaacgatcgtgccatccggattgaacgtgtagcagtttttaaagaccaacctcacgtctctctcaaaatcctccattgtttgatactgccagtcatttaatttcttggcgattgtgcctaaatccattggctctttaacataatcgaaataagtcggcaaattcatagaaactgggtctactggttccaaaaatgggtagttataagaggcgtgcttcttggccatcaattcctttagcacactctgacaaaatttcattgcttgttgtagtcttttggatttcggtttcttcgattcataaggataaatatcctttgatttcggcggatgtatagtccttttcggcctcccattatgagtttgggctcgtctaattacaattggggcatcctcttgggcactagaccgccgtcccttggctattacaggtggagcatccttagcaggcatatttagcatatgtttctcgaaagaagcttgtatgtttcttgccatttgtgatatgcccgcatttggaccgttgaatttaatactgttgttaaccatgagattgaaatcctccgtgatttgctccggaacttcataagcgcctacgttcaacttcctctctatagtagacaagtccattggcctctttatgtagttaaagtaaaagggaatatccaatttcactgggtcaacaggttgtagaaagggtctcgcatccttcaagcgtttgacagctttaatcgcaagcaatgcatgtttctgctggtgctttggtattggattctgagggagattattcatatcgggctctggaggaggagcaggggcaggttcctttggaacctccatcggaagttcttgttttgagttttcatctaaatcctcttgtttggtaccttgtcctccttcttccttcttcaacccctgctgttcgtcttctgcgccacttccggtggcgttatacccattttccccgttagccgccagggtggcgccttcaataccgttctctgcaagtccagcaggcgatgatgttagagcatctccatccagtctagcctttttgagatgcaactggttattggcggggttttcttcttctgcgagtccattcgaaggatccccttgatctataggcctctttagattactggaaacgtcgtcattgacattattaccattgacatccacatcgttctgtacgggtgtgatatcggtcattacgtacgtttatcagagccgttgagattcgaccgccttttagcttgtttactgtggcaagggagaaaaaatcaaattatttgggaaggagcgacccagtaggcttaattaagggacaagaaaaacccgctttgtttaaatacttcgcgacgacgcgcgacaagcgacgacggccgacgttgtgagttcacggagcaagcctgaagttgctgcacacacaaagtgcgcggggctactacagcgggggcacgggtgcatacatcttcaagaagaaaaaggtgctgggtaatacaaacacgaatcgacgtaaaacgttattgtacttcctttccgcggctaatagcaactgcagcgtaggaataaatatgccaaaagtgtaaatccaagcgcctgatacaaagtagatgttgaattgttttaaaagacttactcaagtaccaggaaggagctatgtgaacgggatgtaatgaactttccagacaccccagtttgcgaaatgccttttttcagaggcgacttgcgagattcaaatcactgcgcgttttctaaatccacctgtatttacctgctatttgagccactcaggtacagttgcatcaggttgatagttatgttcatttgtgttgcgatgataacctgtccgaactcgttaagattttctcaatacacttttctccgctcctacctaacccttcccagctgtgcttattttgattttcttggaacccatacctcacgtttgaaattgacacccgtacatattccaattctcgtcttgcaaaggaaaaataaccgcgcttacccatcagatatgatttatgatacatgtacacttgattttctatttaggaatctctgtttgcataagagctgctcttatgtttggggacaaatacaaagttctcgtcggttttaccgaaaaatagatcacttagcttgatccaatcattaacatccgtactacccattagagtttcaagttcgtctcttccacaccagtttggcggtctctcattcaacttcacagggtatctttcacaaatacccatgggacatacctatgaaaaaaggacatgaactcgcagaagaatctacgacattgagaaatgccgtattcgtcggtgccccagtgttccatagagaactgcgcataatcccttaaaatgtctaatctttccgtacttgtcttgtctagatactgctgcgactcaacctcttcaaaaatccatggtttgatcagggcccctcgagcaaccataacactatcaatattttcatttccgttcaaatagcggtaccagtcttcaaaattgttgacatcaccatttccgacaaattgaattctgttcttggaatccctgccttctttgccttgttcggtttcgatgaaatccgcttcggcggatctcaaggtgtcagccacttgactcacgtagtcccaatccgcagacttagtgtacctttgttgcctagacctaccgtgtaaggtaatcgcagccacatcagtttcgttaaccagtcttttgactaacccttccgcgataggatgaccttcctttgtacctgttctgatcttcaccgtgataggaatatctttcgatacgtagttcatcgcgtttaaacaacgaatcattcttgcagggttatccagcagggcgctaccagaaccttgtctgtatagcaaatcgatggggcagccagagtttaagttgatttcacttatttcactgacggagtttgcgagtgcttctgcagcctttgccgcctgccaggctttagaacaggccacttgaaccccgaacccggggaactctgatgtgtgagctttaggtaacgcccactcagaattagttccttgaattaagggaactgccaaggccatttccgaatatgtcacatctgcacctaactttctcattagacgacggtatggtaaattgcctacggttgtcaatggcgacacgatttttttgtggtacaaatccagtggctttttttcttgagcaaaataacgagtgtccttgtacttcaagtatacttcacgctgtttcattctatgttctgacaattctttgttcctctgttcgacttggggggcaactggttgttccacatctgggtcttgtttcttcagctgtggcgttgactcaacttcttcttctggcttcatggaatctctacattcttgttggaaagagtcgatgatttccaatatttcattactttttgtgaaaggaaatcttctttttataagatcgagttttctttccggtgagatatggtttacctcacctttaacggaccatattgtttgcgcatctggatcaatctccttcttcgatattaggatattatcttctttattcagatgagacgataaaaatctgcatttgaatcccatggggcaaaatcccaacgagttgaagaccggacaggaaggaaatatattactttcaacttcaggcttttttgttgaaaggtacagattgatatcgtgaacaaacctacagttatcaccaaaggagcatttagatatatcgccatggatcaagcgtgggcacaagacattctgttccttgacctgcctgttatctctattcttgttttgcccacgcttcttacctcttccgttcttatttttcttattagtcccacctgcaaactcgtttgtcattctgtcggaagacatctcttcatcatagatggcgaccttctggttttcattctgcttcaatggtacaatatattctggtttgatatgtgcaatacctttggacggggaagtgtcttgtctcttcacggttgagttgtcgtcgccaacaatagagcgtttttcagcgttttgctccatcaataatgtttagaagttgcctttttttcctattctgagttcattaatgtttcattactgctcatctcatcactacacattcgaactaaattcttcataactttaactagatcttatgaaacttttcaaaaatggtgcacgggctttctgtatattgaactttccgtcgcttttcggagctacaattcccctacccggcttgtcggcattaagtctcttcatcccgtgtactattacccgacagtttctgcggcatgttctgtggaacgacggtacgggcggtgactgggtgccaaacagtgcggcgttcccgtgcgcaaggtggtctgcggtaggaaaaagaaacaaaacgcgcctacgtcgtgcaaggggacaggattttgtcagttacataataaggagcaatttcgaatcaattgaaatttggaacaaatgggcgatgcattcgttaaaaggcgattttgtatcaaataacgtcactatcagccattgtcacttgccactgtcgcctgccaccgctattgccattatcatttgctttcgcatcgtcaccgatttaaagctctctaggctaacgtacgcattttacctcccaggccctatctcttttctacctgtcatccctatataacgtcttgtacattctagtggctccgttaacaaggtttgacaaatattacaatcaaagaaggatagcgctagtcaatctaatcattaagttcgcttataaagagaaggaaagctagattttttttctacttcaattacatatcggtgcttctctctggtggttttctgtttttctaatattgatcgattttacggtgagttaaactacttccttttatcgcaatatcatatttagagcgagaaagcaagaagaataaagctaggagaaaaaagcgccacgatacattcatactaagtttataatataccggtcgtcttttggctttctgataccatattatatcctcgaaacactttctctggattcacctactattaatcacctcaagatttcacttgtaaggcgttttcaaatttattgttattaaaagacatattcatattcagtatttttatttttcttcgaaacaggaaaagcttatctgagtatggattttacaacaatgactatggcaagcaatatggctactagtactactacgacggctacatcggcacatgcatctataaattcgtcatcaaactttaatattgatattgattcgaaccagaatactccttccattttgataaataacaattcggattcttctaatggaaaaaacacagattttaacggcgtcaataatattcaccaaaaaaatatcatgaataatacaaataatgttcatttgtactctccaaatataatggaccaaacgctactaactccacaggacattgccaagttacggagagaatcaatagcccattctcaagggatgggtggtgtttcatggggatccattagtgttggttcttggttaagagatgaaattattagccgtagaaatagtattgtacctgcatcagcaaacggtgctgcctccgctgccgcttctgcaaccactactgccactaatactttgcagattcaacaaccaactaagagaccctctgttagtaatccgccttaccatagagggtattctatttctcctcagatagcctacactgcttatctgccaaatctagaaaagcaatattgtaaagattattcatgctgtggtctttccttaccaggtttgcatgatttgctgagacattacgaagaagctcatatatccacgtctcctaacactaccaatatgtcacaaataccgatgaactctgctggtaacactagttcatcagttcgtatgacaaataatacctcttctgccaactataacctgcagaataacatggccgctaatacaaaaaatgcaggtcataagactaatactatgcaggctcatagcagcaatgcaactaataacacctccattaataatatgcatgccaatcttcagagcaacatggattccaactccacaatacgacaatctcagcatcctcaccatcagcagaatataatacaacaacagttgcaatcgaattctgtaaatcatacatcaggggctgtacccacaccgagtgtaatgggttcagcaactgcgtcgtccacaactgcaaatccaaatgtgatatctataacgggtgcccccaactcgggcttatctatggctaatcactctcaacaactacatctgaatggtaatctagtcgatgccgtttcaacgaatgatgtgtttttaagaacgagcaattctccatcaagacacgttccgcacaataaacaaattaacagtaacaataatagtggtatcaatatcaataataatacctcacacaattctaatattaacatgggtagtaaaaacgccatggtgaatcgtccacatacttttaataactattccttgaacaaaacgtccaggaatcctattcaacatcaatcaagaaaaattgatcctcatcaaaccgatttatcacctctggtacttgtccaagatatagatttaagttttatggatgatgatattttgggccctagtaaccacaattccatgaactctgtcgtaaatccaactacaggttctcacaactacaatacttttcattcttccgtacacgcaaaatcttctcaaaacatggtcgaggatcaagacattgatgacattgatgatgacgatgatgttgatgatgacgatgacgatgacgatgacgatgacacagaaaatggctccagttccaatggaaaatcagttcataacaacaattacaagatgcctcagcaagcttatatagacgatcctgcgagaaggctctatgtaatggatcatgaggaacaaaaaccctttaagtgtccagttattggttgtgaaaagacttataaaaaccaaaacggtttgaagtaccataggttgcacggacatcagaatcaaaaattacatgaaaaccctgacggtacatttagcgtaatagatccagattcgacagattcttttggtgatggaatgggctctgcaaaggataaaccataccgttgtgaagtttgtggtaagagatataagaacttgaacggtttaaaatatcacaggggccactccactcactaagatataattgtttctttactgaattgatttagtatgctatttagatactaattctaccgttaccgactcatgcatcgagcggccgctctttctcttgttgttgggcgcaatttatgtgatcatctttgaacgaaaatgcatgataaagctgtgctcttcgactgttaccattaatttcaaaaaataaaaagcatatctattattgaaaaatgaacttataatagaataacattttcttgttttgtcatcatttcctctaaatactccgtcatgaaaacgatttgcgctctgtctggtctctccttttagtattattgttgtgtgttttttactattcattttttactactgtgtttttactatatatattttggctttacttacttccttctgttctgatgtattaaaaactatttttattctaagaaaagaaactttaattcttcttattcatgctctaaatcttaaataaaaggttccgttttttatctgcaattctgtgtatttgtaagtgaattaccatgcacgttgtcggatcgtttttctaggcagaaactatcttattgaaccattaaaagattacttaaatattacaattaatcttacgaagcatattaattagactggaattacagcgcaactatcacaggttaataattggttgagaaaatattatagttttgttagtaatgttgaacttttattttatacacttatgaaagtaaattaattcaatatcaataataatatactataagtaacttaaaaagcaaccttcctcccaaacctacaatccaatcacgctgataagtattatctagaaagttgacaacaccaagccatatggtcaagaaacatttattgagagttattttgtaaataagacttttcgtcatccatataaagcaacctaattgttcatctaatactagagtcgctcttttgaaagttaagtataactacctcatcattagttgctactatgtgtataatttgaaaatctcaacgtaaggttattaaaaatataaatgcgcgtaagacagaaaaatagagacagcttacggcaaattatcaaaatgtgaatccaaggtttcaagaaaataagataaagtgaataggaaggatgaaaatcaatgtatcccgtccattacagtttttacaatggagttcatatattgttgttgcatttctgatacaattgctaatcattcttcctttatcgatcttaatatatcacgatttttacctaagactattacctgccgattcctctaacgtagtcccccttaatacgttcaacattttaaatggcgtacaatttggtacaaaattcttccaatctattaaaagcattccggtaggtacagatctgccgcaaacaatagacaatggcttatcacagttaatccccatgcgtgacaacatggaatacaagctcgatctaaacctacagctttattgccagagcaaaactgaccatttaaatttagacaatttgttaattgatgtttacagaggtccaggcccgctattgggtgctcctggaggaagtaacagcaaagatgaaaaaatctttcacacttctagacctattgtctgcctcgcactgacggattccatgtcgcctcaggagatcgaacaactaggcccatcacgtctagacgtttacgatgaagaatggctaaatacaataagaatagaggacaaaatatcgttagagtcttcatatgaaacaatctcggtgttcttgaaaacggagattgcccaaagaaatctaataatacatccagaaagtgggattaagtttaggatgaattttgagcagggattaagaaacttgatgcttcgaaaaagatttttatcttatattattggcatttcaattttccattgcataatatgtgtacttttttttatcacaggttgcactgcattcatttttgttagaaagggtcaggaaaaatccaagaaacatagctgatagaattgtacttctcgctatataattttaaaacctagctgttattttctaagtaagtaggctcttccagcattctgcttcttcgccctgaataaaaaaaagatgatcagcgaaaaaactcaaaatgaaaataagagatggattcttcaaagttataattcatatgcagaataaagattctaaagaaaatgcacacaatgcatattccatccggtgatgttctgataccgaagccgaagcttattactgaagaaacagatccactgcatataataaagacgaggcaaaagacacatggtcggcccgtgaccattgcaggcccaatggttcggtattccaagttaccattccgtcagttgtgccgagaatataacgttgatatagtttactcccccatgattttggcaagagaatatgtccgtaatgagcatgcaagaatctcagacctttctacaaataatgaggacaccccgctaatcgtccaagtaggtgtaaataacgtggctgatttactaaaatttgtggaaatggttgccccatactgtgatggtattggtattaactgtggttgtcctataaaggaacaaatccgagagggcataggttgcgctctgatatacaattcagatttgttatgcagtatggtccatgctgtgaaagataagtatggcgacaaactaagaattgaaacgaaaataagaatacatgaggcattggacgagacggtggagttatgtagaaagctatgtgatgctggggtagattggattacgattcatggccgaacacgtagaactaggtcatcgcagccggctaacctggatgcgataaaatatatcatcgagaacatcagcgacaaaaatgtgcctgtaatagcgaatggggattgttttaagttatccgatttggaaagaatcaccaaatacactggtgcacatggtgtcatggctgtgcgtgggttgttaagcaatccagcgttatttgctggatatactacctgcccttggggctgcattgagaagttttgttattgggctctagagtttggtggcttgccttttcaattggctcagcaccatctgtactgtatgcttgaaaatatggagttgaagaaatctctgttaaagaaaatgatgaatcttaaaaattacattagtctgatcgactggtttaataaaacctttgagttcaagcgttacggcgaggatggatttggcatgggcgttgaaattccttataaagctaatagctgtgtgcagaggagcgcctcagtggttgagagacaagaatgaataaattttgaattacaaaaatctaataaactgtggtactgaaattgtatatattttcctatcattcaagagcgtatactcgtaccccgaaagcagctctgtttgtgtaataatataacctaaaagaaataaaatgcttataagatggacattatttttttttttttacaatttaagcatcttcttcaacgacaacggtttgtagacccttagcagaggcaaccaaaactggttcgacgtaggaaaacaatgggttcttggcatcttcttcttcgtttctctttctggagattctcaatctcaatctgtattcaacacccttaacacctcttttccagatagcttggttcaattctggggctagacggacatcttcagtacccatgtgtaatttggcgaatttcttgatttccttcacagctcttggagctctctttttgaaactgacaccatgtagctatattaatatcaattcaagattggtctgttagtaaaaaaaaagttgttataagaaggtggaactaaagcatcacgccaaaaacatcggcccaagcgccattatagtgtaaacgtgaggtacggatatcgatcgcagaacacagagaaatgcagtaccgaagaagaaccttccagtccttgcatcacgcattccatataataacctctaatattccgaattaaaacctggggtcaatcattggaaaatgaaatttcacccgtatagatttcgcttggtatttcaccacaatatcgcttgttggctttcaataatttcccacgtaaagacaacgctaatttcgacatactcttttgtgcaagttgatggtgtattcacgagtgacaacgtcttttaaaccggccattttcaagtactttggattatctgctcgtgcaattgaaatatactaagacccaagactatgtaaaactaaggaacctatcaacaatgagactggtcaaataatagagtaaacatgtacatgaagcactaccatcagaaagagcttacaaggttacgaaacaacgtcagtgccctctgtcgcattaccctcggtttcgcgcccttccagttggcatttgaagtgccaatccaattgtgagcacatccaactagcgtgcccttgcaatcccagaggacaccatacaacttccagcctagtagtgaacttaccaggcgaggagcgcgggcgccagagggcagctcatctgcgttccggctctaacgagaagggcggaaatggcaccatcacctgaaaaagaacgtaatctaggctgagccgcgcctttaagtttttgtcgcatctggctgcgcttcatttaaacggcactcctaaaaaattgtatgaggtgattttttttgtgtacagatgtacggatgtacggatgtacggatgtatactatgtaataatgcacggatgtagagaaacagaaacgaggataataaaatcggtttttgtatcatctggcggcgatatggcgcaaggctttaagtaaacgtcctatatggtactaacggggttttattccgaatcaaaagaaaaagagatacgaagtctctcttagtaaaaaagtctttatggaagattatcgataattcgataattctaccgacaacagtggttttgtttggctcagcaaacgtgcagcaccatgatcttggtagatttcttctttaccctcaccttccccacaccatgtttgcttgctacccgtgtgtaatgctatcagcgcgcgtttctttttttttcttgctaacatttttcaactttaaaatgaaacgatgcatgagtgatagaggcattgaactttagtaaacaatagaaataaccatcggagttattatttttttctgcttattctttggtcgcaaaaaagtgtgttgtataattctttggaatatttataaaaacagggaatactctaacaacaaacgctagtgcttagctactcttccgctggtacttcaatatagcttgtcacatatttttgtccattaaggtcgttaaaacccgaataattttgtacgatcagtttagtaaaagaaatacagtattcaaaagctaacggtttattatgactgtttctacttccaagaccccaaaaaagaatattaagtataccttaacacatactttacaaaaatggaaagaaactttaaagaaaattacccacgaaacgttgagtagtatcgatgactctagtggaagcgatgaaaaaatagaggctctgtttactgtgtctcagcctgccgtcgtagcctccaagggtatagacagagatagtggtgcttctatgtcgcaggtaggaggaggtgtcaatagtacattggagatgaagctcacagatgagagtgaggaatctagctctgctaataacacgaccacaaccgcctcgcatactctatcgaattcgaagaagtctacgcagaactttgaaaactataacgtagtggaggaacgcataaaattagcacagaaaagtaaggcgccgttttgtaacgctgagaaaatctggaaacgaagaagacaactctggacacaacccactgagcaaagtgaaagcgccaataatgacggagttactcgaagggagattttccaagctatacctcaggaatattatgctcgagtttacaagaaactggtggtagatgataagccattgagagagcctctaaatctggaagatgctttacaagtcataaatgcaggctggacggaaacgagaaagtgggctaatgctgccaaggcatgccatgactgagtgtcgacgtcctttttgttttgccttatagcatcttttcctttcttcaaatttgcattacacaactttaactcagttaaagaacttcgtcatttacttattcttcttttttttcttacccttctttctcaaatcttatttctgtataaaatacgtattgattcattccattaataataacatataataatagtactaatttaaaaacattgaatatatttatcgttttatttcgagttgcgattcttttctatcagttggtacgtcatttcaaggattcggagatccctatccacaagctctgcttccttttgtaatgcttcggtatgccccatatacggagtgtacttttccaacatatagttaataggagaaacacacttatttttaaatgagtcgtcatgaagtcgcaataacttcttcaactgtacatttaaaatatatgattgattattttcaatttcttgcaaagtcttcgaggcttctgttctatgcggagagttgattattttgtcgagtaatcggtcaagttcttcagacctgtttggcatttttacgattatccagttcacacacattgagaatgtaaggaacatttatttattgtcgatcatttattaaatgtgggagggaccctttaagaacactgcaacaaacccaataaataattcttggttaccctctcaaaaaacatcataggaaaaagaaaaatatacaatctgcctttgttactaatatacttgttctatataatgctcacgcggtggtcacaaaagctgccactcccatgcaaaacttcacaagatcatctaatctgtcttccttcttatgtacatcctcccaattttgaagagcagaggcaatatcttgattcttgttgttagcatgaataacatcaccgtgtgccttaaacagtaagctcataaacgtttcataaagttcgaaatttttattgctcttcaacccctgtgttaacgcgtcgataaaccacacaatttcatcaaatggctcaaaggaattcaatgatcttatctccaaatccactgcagcaggtgagaaatttattagagtggccagcaatgatgaatagtccttggattgtgagccctctcgtaattgctttgtgaaatgtgattcaaaccctaatcttcctgtaactttgaatttattcatttgctcttctgcatctaacttcttttgtgcttcttgatctctgcgatggatttcttctggtgtttcatgtgctatgccttctctgacagaggcttcatccccaaccttttccccagatagttgcaagaaaaatggaagcttttctgatttctttggagcttcctttggcttagaacgttttctgataacatctaaatgaagcaatgtgttcattttacttctaggtcctattgataaagtcaacagctccttatcaatctgttccaatgatgtataagtgttgaaatcaatatcatttaggtcttctcctccattgctttctaaagcccctgataacatcgagtcgttccctcgaacagatgtgctaggtaacgccattcttgcaaattcagactcatcgatggttcttgtcgatactgtcttaaattgtgctctgttcgtccagatgcatataccattaccagtaacatgggtagtggcaagcaagtcaccattcggagaaaactttacattcgtagcgacattatctactatgataccatcgatacatcctccggttggaagatcccacgttctaatggtggaatctagagaagcggaaacaatccaacggccctcaggtgagaaatcaaatgcagttattctattactatgaccccataattgacgaacaactctttgagtaactgcgtcaataacaacaattgataagtcgtctaaagccaatgcaaatagatcggaagaacgatgataaaccattgcggtaataggtgcatccaatttcaattttcccaacaaggttgacttgttaaagtcataaaaaccaacaataccgtctagtccacaagaaaccattttacgattcataccatctaaggatataccggtgactgctcttttgtgcaatttgtattttttacggagtataccactttgcatattatagatggtgatagagccgttagaagaaccgatgaatccaaaattaccacattgcgacatggccacagatttaacaaatccatcatcagtagtatcaaaagtccacctgccaactcttttatttcgcatatcccaggttcttgcaaacttttcatctttatgtgcagtgataatgttttcccattcacctattctggcattttcaattgcaagagccactatttcaggaaatttagacttaattgtactaccacctaccctgccgccatcttgtttcttgtgtaacctttgtgacatttcttgcgactgtgcatctttacgcagagaaaagctccataatgatctatctttggatgctgatagcatgaagtgtgattgcgaatcagcaaacgcaatgtatgaaggtggttgagaatgaccccctctggaacgtagatatcttggcggttgaacaactacatcaccgcttccttgagataatgacggatcgaaaacgtactccttcagggaattgtcaccacctgatgtaacaataatgggttgaccatttaaaaaagtagcctgagtgacaccaccgtacgattctctatgaatgttcttcaaaacgtgtattcttgaacggcgatctaaatcataaaatattagatcaccactgctcgttcccacactcaaatgagaagaaccgtcggttctgaaactcaatgaggagattcttgattgcggaatcttaattgtgcggatccttttaccttttctcatattaaacataataacctcaccggtcacggtacctagagcaataatatccaggactggagcgggttcagcagttgtgatttggtctggaaattcgtttgatgtgaatacaagcttcccggttctgacgttaaaaagtaaaacgttagatttggtaacgacagttaatttattcaaataagttgccaaatgttgtaaagacacaatttcgccaccttgaatttcagtaacggtaagtttagtgtagaattctgatggatatttatcttgcggatcggacttcttgtatataaagatggaattgtcgtcggtggaagcgcaaagataatctccgaatatgcacaaatgttcgacatttgcatcagtttctagctcaagcaaatgttcctcaatacccctcttgtaaataccaaccttgttttcatatgctgcgtagacgtagtgaaagtgtgctgataatgctacaattgaggatggtgtttctttctcggaaacaaaaagtaaatgtaaggtattcgcatcatatatctgaaatgttttaccaacacacgttacaatgtaaaaggtagatcccaatgtaccagtagcaaaaggaacaccattgctaacattaccaataatccggaaaggggaaaatatcttagaatttttccctctacttcttacgtcttcttcgacttttctttttttcaagtcgatagacataatgtactattcctaactcgctatagccttttcagtgtcttattccttgctgctgtttcgctgtatatttattgtgcttaggacttattaaatttcattagcaatctcatcgcgaaatttttctcaaaatttttcagttaaaaaaaaaaaagcacgtgctcaaaaatgtttttagaaaatcatttatttaagataggaaaaatgcaattaatcattgaatcaatatgttcaccacttaaattacccactgagcatttcatacaaattcaaaagcatctcgtagcatattaatatattgcagaaggtcatgagtgggataaagaaggaaccgattgaatctgatgaggttcctcaacaagagacaaaaaataacttacctagtgcaccttctgagatgtcaccccttttcctaaacaaaaacacacagaaggctatgcaatctattgcaccaatattggagggtttcagtcctaagacgtcagctagcgaaaatatgtctttgaaattgccacctcccggtattcaagatgatcacagtgaagagaatctcaccgtgcatgatactctgcaaagaaccataagcactgcactaggaaacggaaacaacaccaatacagttacaacttccggtttaaaaaaggcagacagtgaatcaaagtcagaagctgatcctgaggggctcagcaattctaacatagtcaatgatgcagataacataaattccatctccaagaccggatcgccccatttacctcaaggaacaatggacgctgagcagactaacatgggaactaactctgtacctacttcatcagcttcttcacgcaaatcctcgactagtcatcccaaacctaggctacccaaggtagggaagattggggtatgtgcaatggatgcaaaagtcctttcaaagccaatgagacacattttgaatcgtttaattgaacatggtgaatttgaaactgtcatttttggagataaggtgattctagatgaaagaatagagaattggccaacttgcgactttttgatatctttcttttcttcaggatttcccctagataaagcaattaaatacgtcaagttacgcaagcctttcattatcaatgatttaataatgcaaaagattttgtgggacaggagattatgtctacaagtattagaagcctacaacgttccaacacctcctagactggaaatcagtagagatggtggtccccgtgccaacgaagaattaagggcaaaattacgtgagcatggcgtagaagttaaacccgttgaagaaccggaatggaaaatggttgatgatgatactttagaagttgatgggaaaaccatgactaagccctttgttgaaaagcccgttgatggtgaagaccacaacatttatatatactatcattctaagaacggaggaggcggtcgtcgtctattccgtaaagttggtaacaagtcttctgagtttgatcctactttggttcatcctcgtacggaggggtcttacatttatgagcagtttatggataccgataatttcgaagatgtgaaggcttatacgattggtgagaacttttgtcacgctgaaactaggaaatcacctgtggttgatggtatagttagaagaaatactcatggtaaagaagttagatatattactgagttatcagacgaagagaaaaccattgctgggaaagtttccaaagctttttcacaaatgatctgtggtttcgatttgcttcgcgtttctggtaaaagttacgtcattgatgttaacggattttcttttgtaaaggataacaaagcttactatgattcatgcgccaatatattgagaagtaccttcattgaagccaaaaagaagatggatatggaaaagaagaatctgcccattattcgtgaagaaaaggaacaaaagtgggtattcaaaggactggctatcattatccgtcacgcggacagaacaccaaaacagaaattcaaacattcattcacttcgcctatttttatatcgttactaaaaggtcacaaagaagaagttgtcattcggaatgtaaatgatttaaagattgttcttcaggccttaagaattgcgttagatgaaaaagcaggaaatccagctaaaattaaagtgttagcaaacgctctagaaaagaaactgaattttcccggtacgaaaatacaattgaaaccggttttaaataaagagaacgaagtggaaaaagttcagtttattttgaaatggggtggtgaacccactcattctgccaaatatcaggctacggaactcggagagcaaatgagacaagattttgacctattgaataagagcattctacaaaacatcaagatattttcatcgtctgagagacgtgttcttcatacggcgcagtactggaccagagctctttttggggccgatgaattaggtagcgatgaaatcagtattagaaaggatcttttagatgacagtaatgccgccaaagatttaatggataaggtgaaaaagaagttgaagccacttttaagagagggtaaggaagctcccccacaatttgcctggccttcaaagatgccggagccatatttagtcataaagcgagtggttgaattgatgaattaccataaaaaaattatggataacaactttgctaaaaaggatgtcaactcgatgcaaacaagatggtgtacttctgaagatcctagtttgtttaaggaaaggtgggataaacttttcaaagaattcaataatgctgaaaaagtcgatccttctaaaatttctgaattgtatgatactatgaagtatgatgctcttcacaacaggcagttcctagagaacatatttgacccgggtcttccaaatgaagctatcgccgatgaactcggcagtcattctttagttgaccgatacccaattaacgttctcgccaaaaataattttaagataatagacagtcatagcatgaacaattctggaaagaacagtagtaatagtgttgggtcgttaggatgggttctggaaagcggaaaaacatctacagcaagaaaccccaaatcttcttctcaattcgatgagccacgctttatgcagttgcgggagctgtataagctggccaaagtattgtttgattttatctgccccaaagaatatggtatttcagatgcagagaaactggatatcggtttgttaacttcgttgcctttggcaaagcaaatactaaatgatataggagacatgaaaaatagagaaactccagcttgtgttgcgtacttcaccaaagagtcccatatttacactctattgaatatcatatacgaatctggtattccaatgagaatcgctagaaatgctttaccagaactagactacttgtcgcagatcacttttgaactttatgagagtacggatgcttctggtcaaaaatcgcattccattagactaaaaatgtctcctgggtgtcatactcaagatccgttagatgttcaattagatgacaggcattatattagttgtattccaaagatttccctgacgaagcatttggatatggactatgttcaacagaaattgagaaacaaatttaccagggtcattatgcctccgaaatttacaccagtaaacattacgagccccaacttgagtttccagaaacgcaaaaccagaagaaagtcggtatctgttgagaagttgaaacgtcctgcctcgtccggatcttcatcatctacctccgttaacaagacattagattagtgatcacacccaatttttaatttagtaacccaaaactaaataagtatttactcaacttttttttaaaaaaaaaaaacttaattgaattttgctcgcgatctttaggtccggagttttcgttgaacccttagacgagcaaattagcgccataaggatatgcgtcagagcacattaattagtgacatatacctatataaagagcaaccttcttgttggaataaaaatcaactatcatctactaactagtatttacgttactagtatattatcatatacggtgttagaagatgacgcaaatgatgagaaatagtcatctaaattagtggaagctgaaacgcaaggattgataatgtaataggatcaatgaatattaacatataaaatgatgataataatatttatagaattgtgtagaattgcagattcccttttatggattcctaaatcctcgaggagaacttctagtatatctacatacctaatattattgccttattaaaaatggaatcccaacaattacatcaaaatccacattctcttcatggtagcgcctatgcttcggttacttctaaggaagtcccatcaaatcaagatccgttagccgtttcagcttccaatttaccggaatttgatagagattccactaaggttaattctcaacaagagacaacacctgggacatcagctgttccagagaaccatcatcatgtctctcctcaacctgcttcagtaccacctccacagaatggacagtaccaacagcacggcatgatgaccccaaacaaagctatggcctctaactgggcacattaccaacaaccatctatgatgacgtgttcacattatcaaacgtcacctgcgtattatcaaccggacccacactatccgttgccacagtatatcccaccactgagtacttcctcacctgatccaatcgatttaaaaaatcaacactctgaaatacctcaagctaagacaaaggtgggaaataacgtcttaccaccacacactttaacatcagaagaaaacttttctacatgggttaaattttacatcagatttttgaagaactctaatctcggtgacatcattccaaatgaccagggtgaaatcaaaagacaaatgacttatgaagaacatgcgtatatatacaataccttccaagcatttgccccatttcatttattgccaacatgggtaaaacaaattttagaaattaattatgctgacatccttacagtcctttgtaaaagtgtgtccaaaatgcaaactaacaatcaagaattaaaggattggatagctcttgccaaccttgagtacgacggaagtacatctgctgatacatttgaaattacagtcagtacgatcattcagaggctaaaagaaaacaatatcaatgttagcgacagattggcctgtcaactaatacttaaaggtctatccggtgacttcaaatacctacgtaatcaatatcgtaccaaaacgaacatgaaactttcccaattattcgctgaaattcaattaatatatgacgaaaataaaatcatgaatctaaataaaccgtcccaatacaaacaacacagcgaatacaaaaatgtttctcgcacatctccaaacacgactaacacaaaggttacaactcgtaattatcatagaacaaatagttcaaaaccaagagcagcaaaagctcacaatattgctacatctagtaaattctcaagggtgaacaatgatcacattaatgaatcaaccgtttcatcacaatacttaagcgatgacaacgaacttagtcttaggccagcaacagaaagaatctaagccaacacacacaatagactcgaatgacgaactacctgatcaccttcttattgattcaggagcttcgcaaacgcttgtcagatcagcccattatttacaccatgcaacacccaattctgaaataaacatagtcgatgctcaaaaacaagacattcctataaatgccattggtaatcttcacttcaactttcagaacggcaccaaaacatcaataaaagcactacacacaccaaacatagcctatgatctattaagtttgagtgagctggctaaccaaaatattactgcctgctttaccagaaacactttagaaagatcggatggtacagtactagctcccatagtcaaacatggagacttttactggttatctaaaaaatacctaattccttcgcacatttcaaagctaacaataaacaacgtcaacaaaagcaaaagcgtaaataaatatccatatccgttaatacatcgaatgcttggacatgctaacttccgaagtattcagaagtctcttaagaagaatgcagttacatatttgaaggaatcggatattgaatggtctaacgctagcacatatcaatgtcctgactgtctaatcggcaaaagcacgaaacatagacatgtcaaaggatcacgactaaagtaccaagaatcatatgagccttttcagtacttgcataccgatatatttggtcctgtacatcacttaccgaaaagtgcaccttcttactttatatcgtttacagatgagaaaaccagattccaatgggtgtacccattacacgaccgtcgtgaagaatctatcctcaatgtttttacatcgatattagcatttattaagaaccaattcaatgctcgcgttctagttatccagatggatcgtggctccgagtacactaacaaaactcttcataagttctttacgaacagaggtattactgcatgctatacaaccacggcagattctagagcacacggtgtcgctgaacgattaaatcgtactttattaaacgattgtcgcacactgcttcattgcagtggtctaccaaatcatctatggttctcagcagtcgaattttctactataatcagaaattcattagtctcaccaaaaaacgataaatctgcaagacaacatgcaggtttagctggactggacattactactatactacctttcggtcaaccggttatagttaacaaccataatcccgactcgaaaatacatcctcgtggcattccaggttacgccttacatccgtcacgaaactcttatggctatattatctatcttccatcattaaaaaagacagtagatactaccaattacgttatattacaagacaaccaatccaaattggaccaattcaattatgatacactcacctttgatgatgatctcaatcgtttaacagcccataaccaatcttttattgaacaaaatgaaacagagcagtcatatgatcaaaatacagaatctgatcatgactatcaatcggagattgaaataaactctgatcctctagtgaacgacttctcgtcccaatcaatgaaccccttacaattagaccacgaaccagtccaaaaagtacgtgcaccaaaagaagttgatgccgacatatctgaatacaatattcttccatctcctgtacgatctcgtacaccccatatcattaataaagagagtaccgaaatgggtggtaccattgaatcagatactacttcacctagacactcgtctaccttcactgcacgaaaccaaaagcgacctggtagtcccaatgatatgattgatttgacctcacaggatagagttaattatggacttgaaaacatcaaaactacacgtttgggtggtacggaggaaccatatattcaacgaaatagtgatacaaatatcaaatacaggactacaaatagtacgccctcaatagatgaccgttcgtccaacagtgaatccactactcccatcatctccatagaaacaaaggctgtatgtgataatacaccctccattgatacggatccgccagaatatcgatcttctgaccatgcgactcctaatataatgcctgacaaatcctcaaaaaatgttacggctgattctattcttgacgacctcccacttcctgacttaacccataaatctcctacggacacttctgatgtttcaaaagatattccacacatacactctcgtcagactaattccagtttgggtggtatggatgattctaatgttctgactactaccaaaagtaagaaaagatcattagaagataatgaaactgaaattgaggtatcccgagacacatggaataataagaatatgagaagtctggaaccaccaagatcgaagaaacgcataaatttaattgcagcaataaaaggagtgaaatcgatcaaaccagttcgaacgaccttaagatatgatgaagcaattacatataataaagacaacaaagaaaaagacagatatgttgaagcttatcataaagaaattagccaactattgaaaatgaacacttgggatacaaacaaatattatgatagaaatgacatagatcctaaaaaagtaataaactcaatgtttatatttaacaagaaacgtgatggtacacacaaagctagatttgttgcaagaggcgacattcaacaccccgatacatatgattctgatatgcaatccaataccgtacatcactatgcactgatgacgtcactgtcaatcgcattagacaacgactattatatcacacagctggacatatcctctgcttacttatatgctgatatcaaagaagaattatacataagacctccaccacatttaggtttgaatgataaattactacgtttgagaaaatcactctatggtttgaaacaaagtggtgcaaactggtatgaaaccattaaatcatatttaataaattgttgcgacatgcaagaagttcgcggatggtcatgcgtatttaagaatagtcaagtaacaatttgcttattcgttgatgatatgatattattcagcaaagacttaaatgcaaataagaaaatcataacaacactcaagaaacaatacgatacaaagataataaatctgggtgaaagagataacgaaattcagtacgacatacttggattagagatcaaatatcaaagaagcaagtacatgaaattaggtatggaaaaatccttgacagaaaaattacccaaactaaacgtacctttgaacccaaaaggaaagaaacttagagctccaggtcaaccaggtcattatatagaccaggatgaactagaaatagatgaagatgaatacaaagagaaggtacatgaaatgcaaaagttgattggtctagcttcatatgttggatataaatttagatttgacttactatactacatcaacacacttgctcaacatatactattcccctctagacaagttttagacatgacatatgagttaatacaattcatgtgggacactagagataaacaattaatatggcacaaaaacaaacctaccaagccagataataaactagtcgcaataagcgatgcttcatatggtaaccaaccatattacaagtcacaaattggtaacattttcctactcaacggaaaagtgattggaggaaagtcgacaaaggcttcgttaacatgcacttcaactacagaagcagaaatacacgcagtcagtgaagctataccgctattgaataacctcagtcaccttgtgcaagaacttaacaagaaaccaattattaaaggcttacttactgatagtagatcaacgatcagtataattaagtctacaaatgaagagaaatttagaaacagattttttggcacaaaggcaatgagacttagagatgaagtatcaggtaataatttatacgtatactacatcgagaccaagaagaacattgctgatgtgatgacaaaacctcttccgataaaaacatttaaactattaacaaacaaatggattcattagatctattacattatgggtggtatgttggaataaaaatcaactatcatctactaactagtatttacgttactagtatattatcatatacggtgttagaagatgacgcaaatgatgagaaatagtcatctaaattagtggaagctgaaacgcaaggattgataatgtaataggatcaatgaatattaacatataaaatgatgataataatatttatagaattgtgtagaattgcagattcccttttatggattcctaaatcctcgaggagaacttctagtatatctacatacctaatattattgccttattaaaaatggaatcccaacaattacatcaaaatccacattctcttcacttctccgatagacttgtaatttatcttatttcatttcctaacactttgatcgaagaagagggataacaacagacgaaaacacatttaagggctatacaaagatgaatatgggaggcagtagcagcactgctgccaaaaaagcgacttgtaaaatatcgatgttatggaattggtataccattgacacctgcttcattgccagatcttggagaaatgacaccaaaggaaaatttgctggttcttgcatcggctgttttgcgcttgtggtggtagctcaatggcttactcgtttttcaaggcaatttgacgtagagctattaaaaagacagaaaataaagcatttagctagttactcgccagaggagtacgttgtcaaatgtggagaagaggatgctaaatctgatatagaagaactacaaggcttttacaacgaaccaagctggaaaacaactttaatttccttacaaaaaagtttcatttatagtttttacgtttggggtccaaggagattgaacgagccagaagacgacctgttaaagaaggtcctatcatgctgtacattaataacgccagtggatttgtacccaacttttttggatcacatgataagagttactattttcgtattacagtgggggttatcttatatcatcatgctgctgttcatgtactataacggctatatcattattagttgtttaataggtgctatcgttggtcgtttcatattttgctatgaacctctaggctcattgggtgctaatggatcagcccagggtacagtgagttatgataaagagagtgatgatcgcaaatgctgcttgtagaaagacaaaaatgaatagaggaaagccgagaggtttgtttcaaaaattgacgccttcctcatttttttcataattagctggtaaaagttactatttgtaacgactgctaaataacaaataattattcgtgtaaaaataaatagctaataccaccaggtgttcatattccatgactgcatatttgggaaacgagacggtttgaacatccttagttgatgtaaaactataataaaagctctatgggaagtaaactatctgcgggtcgggtaaggaatgatgcttgctcgacgtgtagcgatgaaaaaagtgaaaacttatttgaactctagaaaactgctaagatcctgaactgataccgaagttaatgaccttgaccggtcttctgctgtatggattttaaagcaagtgggacaaagtttaagaaaactggcaagaaggtagtgcctgctaaagcgtttgaagaaattgttcagacaaatagagatgttctgaaaaaatcagcattcctctcagatttacttgaaaatttacaaccgcacctcaataacattaagaaaatacgatgtgttgcaattggaaatttcaaggaggattttcctgcgacgtaccaattcgctcttctcctagagattactgattatataaaaagtgaggatgaaagggatgtcgttgtttccctgtatgatccaatatttactaaagaagagatacagtacttgaaaagtttaggaagcaaatggctgatagaggaagaattttcagagaacgatgcaattgattatgaatcggtattatatttccttccccatgctcctttggatttaactgagaacatactatcgtcacagcgaccacacttatggctggcaaataatatgatatcacacaccgatagatacaccaaagcaaaactttgtgaaaactatcctaatttaagcaagctagttcattacttgcagactaacgctccgccagaagttaaaaaagcacatgatgtagatggttttgcaacattcattccaaagagaaaaagaaaaaacagaaacaactcctctaaactcaaggtcacaccatctgatatagactatgattcaatagcaccgaagtttaagtcctgccaaatactcaccgattttgatgaaggaaagtatttgaaggaaaaaccctggatcaattccttctctgacttgacgttacatgctatagagtactaacatatcattcactacatagtactttataactaaactgtaactttcagggcatcgtaacctgacgctttaccatcaataacgacacgagaccgctttatctatgatactggaacaatcaacatgattgttataaatgtactcgacaggatcatgaaaggataccaacttagttgccggttcattgaaatggaaagctcaagaacgtatactgaaagagagcgacgtctactttgcccacaaaaatctactctctgaattgaatagtatttagagattgcataattcaagccctcctcgaggaaaggatataaatgaaaataccgtttttcctgctgatggttatcgtccctgtcaaggatacttctcggactcgaacaacgttacagctcaacttaaagaaggctaaatacgacaagggcgcttgccctaagaggaactgtttctaagttctaacgagtgcctgcgaagatcggttttttttaacttcgcgggcgaattgataaataaagttcttcttgcaattttttaagatcaaggttggggcaaaaaggacgcaaacgaatggttgggttaagaaagtggaaagacccaaacctgaagttcatttagttcttggcggaatgaatcattcgaacggcgcaatacgctcgtcaaagaaggaggtatgatttatgacggtttgtgggtagccctctaaacacgtggagagtaaccttttctgtttagcgatcctagaactgcgaacaatggtagctattcgcttactcaacaatattgttcttgattaatgcattcaaatatgtaacttcgtccctcatataagcgtctgacgcgtcgtgaaaatttaccctctcaagaaaatacaagagattacgtaaaattagaaaccaaaagatatgagtggaacagacacatatcacccatatttccttttcacgtaagaaaacttaagtactagtgcggtgcctgcgttagtgcttgtctttaggtcaaacaggtcatcttgaccaacttagcttataataagaatgataatcgattactctaaatagcattctttcatttgcggcatcttataacccacacaccgcatttaggacccgttttttttctttttttttttgttgaaaaaattcaacagttcctatttttttcttttcattctttttttttgccttgccttcgtttcgagaattctttttctttttctttaggtaagggaccttctcagctgaggcacggtggggtttgtaatagtgtccattctggcacaaatgcataagtgatgctaaaatagtgatacgtctaaacaaaacggtttggatgcctagcaaatagtaaaaagacttgaatatatcacttttatcactatgtaaaaaaactgagttatattattaagttttttttgaaatgttcccgtttgacgtgtatttagtacagtatgttccgtggatactgtttaggtgcatttaagcgctccagaactctcctttaaattcctgcagcactccgtcagttgcttcgtaaatccgcctggataccgccttgaagattaaagttcccctcagtactcgtttagcttgaatccaccgcattatggcctggtaaattccctagttgcttttttctatacggcgtcgtccctggaaaaaaaaaacttgcctacagatcttagtagacaaatttaactacgtcaatctattgttctgcttaaaaaaaaagttgaaattgttaaatcctcaacaaacttatcgcttttcaagctgctgcaatcatagatcttacacttctacacagaatttttttttcctgtaaaaagaacgacaaaatatataaacctttgacaatctagctgcatttactcacattaagccttgagattttcatttacttcataatagcttgtagatgcgatgctgatacagtaaaataaaaattcagtaatacagtcaaattattgcgatgaattttaaaatactcctcccgatttgtgctttattgacacttacaacatttctgttgaccattattgcaactgcgggttctacctcaaattataagccaataacgaacatttatatcggtgatgctgatatatcaaaaatcaacgttacaaaagttatgccacaagttggcccaattttgactgtgttaggttctgctctaaccgctccaaatacaacggtggataccatcttcggcgctcttaaggcaatcgcttctaccgaagccttgtctcctttactgcacttgttgtctaatgctgctaacacttcagccacattatcatctttgacacagttggctccaatggctttgctaggaaccaataccgctactaccacgaccttctccgctcttgatgagttattgactacctctaaaaacacaaccgaactcttggatgggtttagcacattgatgtcatctatgtcaaccaacacttcttctacttcggcttccttagaaaatactgttctaaccctattagtggattcgaccaatcctataggcactactgagtctttgatcactttaaataatatgaccacagaagaaaagacaaaattgtcgcctgtattcgagttattcgcaagttccaagaacattactgccacatgcgatgcgttagaaaccataatgaactctaccattccaacttcaacggtctcctcattgttttctagtctaaaaaccagtcttgcggaaggtggcaatgctactgaaactattatgcaattaggctccctcgttccttcgagtttaaaaccagctgtccaagctgttgttactctgtttgatgaaactacatctcaaaatgtaacattatccgtattgagcactatgattgccgaaaacattacccaatcatcttccgctaaagctgccatgggtgctttgactgacttgttgaattacactacaaaccaaacagagctgctaacatctgtcgaaagtttggccctctctaaagaagccgcttcctctactaaccaattggtggcacttgatgaaatcctttctgcaagtgctaacgcatccacagttgtttccataatccctactttggaatcccaattggccaataacaccgtattacttaagtacgttccatacttgttcagcctattagctgcgtcaagcgaccccgtgtcaagtttctcttctctggttaatatcaccaaatgggcagaaactaatgccgctacatttatgcccatgttgaaaattttaaactctgctgtaaacatgacaactatcacaccagaacaactcaaggaaatgactccttctatccttgaatatctacacatccctgtcatataccgtttgtccattttcacaatgtgtcgtgctcacttaaacagaacaatgtactcgtgtagcaagtcacacgctgttcaaaacatggatttccggtcgattgtttacaacaacattgaaggctcggactttaaaccttatatggatgccctgaacatcggtaaggacgatttgcatttagatggtgaattacaagacagacaacacatgtatgtcccagcagtgaaagcagctttagctatgaacttaatgtgcataatcacatccttcttcttaatggtattcttgttgctactaagtagacgttccgtggtgagtcaaaaattatggttggcattgggctttatttcctgttggatatgtattttcagcgggttgggaagcacaatctttagcgtcatccttaatatgatgaaatccggctccaagaaggacaattacgatgtcattatttctggctcttctccattttatggcctaatgtggtctggatttgtatttgccgtccttgtatttctctgcattgcatactgctggtggagcagcagaaagggagctgccatcgtggaagctgagaaagctgttcaagaaagtgactctactacctcaagaatcattgaagaacacgaaagccccattgatgctgaaaaaaactttgcaaggtaaaataataaaaagaagatcatgcaacatcaccccgtaaattttttcaattctccatccttttaattttcttcattataattttctgaattgtatatagacaatatattttaatcatatttaatatgaaacggaacacaaaaattaattaataaccttgcctttttcaaattcaaatcaatggtttttcctcaattggagcgttcgcatagatgacggtgggcctcgatctcacgctacaccatagaatgaaattcagtaatgctccaacgacagccccccacatcaaaccctggtagttcctaccaatgctcattgaaataccgtaatcactatagttatgctttaggatgtatttgatgtatgagtaagtgcccaaacacgaacctatactgactaatagggcggcaaaggcgaaaaatgaaaaaaaggcaccaaaccacgttagcggccttatgtggatgatccagcgcaatacgttgaacactagattcacaaaggtcaagacaataccaataagaatggtaatgaacatacacttgaccaaattgttgtagtatgtcattttactttttagtttttcgggcaaaacaacactggccacggaatccataagctccagagcctcattgttgttgatattgtcatacactaatgacgataggttaaaattctggataccgtgaggcgaagaacatgattggatgttatgcgaggagtccactgtacagtacgaccaaagccctatatttatatatgagggcaggcccaacgaagatagcgtagcagaactcaaagaagggagcaccgtcgataccttcatctgcgacagatccaattctgcacagtaaattttatttatgggactgtaatttttcgttgatcctgcgcatgcaacaatggctaatataagtgctcctagcgaaaatatagctgcaaaaaataacgtgaaaaaattcctcatgcttatagcgtccttcgatgatgtgtttgtttttttcttaatagttctctattgctttaatcaagtttcactactgcgcagcgttgtatgatcttgatctagtttcttttagttctacttccaaacaactggtccagaatgaaacaccactggacactcattgactactgagacatggaagagcaacattctcgcgtatatatacttctcagccaattttcctgcgagaagcgctaaaaataccgagctgggcttggctgatagtacgcccgatttggaaataacgctcgaggcgtgctgcgtccttttttgcctggccaggccaggccgggttgtcccgcaccattcaacggcggctatctggcgatgttgaaagagggggggagtggagagggctctgagggtcaagtgggaggctgtgacagttctcataagctgggcactgagatacatggaaagaaataggctgttcacagtgtacgtcaatgtgtggctgactaaccgttagcggggcggaaccgacatgtctggtgcagtgtatgtaagaaaaaaagaatgacaatgcatggccaaacttttgatctgtgacgttcgcaaaacgcactactttgctttctgtatgcaatgggaatgaggcgtagcgacatattaagaagccttttccatgtgaggaagcttcgccttgttttccagacgcgctttttttaggatcaacgaagaggaaaaagggtttcacatgtttcatctggaaaagatggagactgaaaaacaaaaaagcagagaaaaggtcatccaagatagaataggggacctcggctaggaatcaggaagtgtgttttgaaagtcattctttttttttcaaaagatggagtactggcattatgtggaaactacgtcatcgggccaacctcttcttcgagaaggtgaaaaagatatctttatcgatcagtccgtaggtctttaccatggcaaatctaagattctacagcgacagaggggcagaatctttttaacgtcacaaagaattatctacatcgacgatgcaaagcccactcagaactcgcttgggttggaattggacgatctagcgtatgtaaactattcatctggcttcttgaccagatcacctcgtctgatcctgtttttcaaggacccctccagtaaggatgaacttggtaaaagtgcggaaacagcaagtgccgacgttgtttcgacgtgggtctgccccatctgtatggtttcgaacgaaacgcagggggaattcactaaagacactctacctacacccatttgtatcaattgcggtgtgccagcggactatgagctcaccaagtcgtctataaattgttctaatgcaatcgacccgaacgccaacccacagaatcagttcggagtgaactctgagaacatttgccccgcctgtacttttgctaatcatcctcaaataggaaattgcgagatttgcggccacagattgcctaatgcatccaaagtacgatcaaagctgaacaggctaaactttcatgattctagggtccatattgagctagaaaaaaattcactggctagaaacaagagctcgcactcggcattatcgtcctcgtcctcgacaggatcatcgacagaattcgtgcaattgagtttccgcaaatctgatggcgtattgttttcacaagctacagagagggctttggagaatatactcactgaaaagaataagcatattttcaatcagaatgtggtttctgtaaatggtgtagacatgaggaaaggggctagttctcacgaatacaacaatgaggtgccatttattgagactaaattgagcagaattggcatatcaagcttggaaaaatctagagaaaaccagcttttgaacaatgacattctctttaacaatgcgttgaccgacctaaacaagctaatgtcgctggctaccagcatcgaaagactatacaaaaatagcaacataacgatgaaaaccaagacattgaacttacaggatgaatcaaccgtgaatgaaccgaaaacgagaagaccgctattgatacttgatagagagaagttcctaaataaagagctgttcttggatgagattgcgagagaaatttacgagttcacgttgtccgagtttaaagatttgaacagtgataccaactatatgatcataactctggtagatctatatgcaatgtacaacaaatctatgcgtataggtacaggcctgatatctcccatggaaatgagagaagcatgcgaaagattcgagcatttaggtctaaatgaattgaagttagtgaaagttaacaaaagaatattatgtgtaacgagcgaaaaattcgacgttgtaaaagaaaagctagtagatctgatcggtgataatcctggttctgatctcctaagattgacacagattttgagttccaataattcaaaatcaaactggacgctaggtatccttatggaggtattacaaaattgtgtcgatgaaggcgatttactgatagacaagcaactgagtgggatttactactataaaaactcttattggccctcgcatatataagtaataaatgcatggtttgattacctgctcgtaatactacattctcccaaataaatagtttacatataaacgcgcggctaaacttcacttcgttacttgaaatgccaataataacacataacatagagtacaaaatcggaatagaaacgccgactgaagaaacactttcaatggccgaaataccattcttccgtttatcgtattcaacggtatcctcttgaaataagttccttttctaaactatgccagaaataacgcacgacttccacatccttaaatcttttatttttgtcaagttcgaccttttctacattccattgctgcacgtgttgtggtacagaatcaccggcaaagtggaaatagtagcctttgcagcgttgaaataattcctgtggcgaattccactgatagttattaaactgccacgtatgaccagtagtgaagatagcgacaactctgtcccaatattctggcttagtaaacatcctagtgttatcgactataataaatctaattggtcttgatatacgttcgaagtttttctctatgttaactaatccgtttggcactgacggtaagttacgaggattcacgtattttgactccagcaggaactgttttatatttgcaacagttaaaattgatgacgcagccgaaggaatcaaaataattggatctttgcgagggccacctgatgaaccatttgttttggaaatacgaccgtgcgcgcccttatgaccgggaggcaatttagatcctcgtaaagatcctttgatcgactgtactaattttagttctgcatcttttattagataaccaaagttgatcggcttagcaccacgcaatgcagagttgtggtccaccaatatacgttcatgtttcattgtttccaccacaactggatcggaaacttcactatcattttcaagagatgctgaagtggttgattttacagtcgacaattcaccagccaaagttttattttctatatctactttatcggatgtctcgcctttctgaccgggtgctttcagatattgggatgattccgtattgccagacaaccaatttattaaatcagttctttgtaaaaatgaaacattagtcaattgtttattctgacagtctgctagatagtctgcggcacttgagtccttattcatccaacaatgaacaattattcgtaactgtaccaatgaaccatcaatctcaatttccgtttcttcattcaatggaaaactatcttgggtactaccatcactggatagagtttctaccatggttgctttcgtaatatcatcagtagactgtccctcattattttttagaaccagtttatcgccgttctttaagtgttctctcagtctgtctaatgagttcgccataattttttcaccagtttcttgctcaaattattattcttttaacgccccgaattaagaaacagcctgttttggaaacgcaatttgaaaaagggtggaatattcgttgaagtacttgttttaaacctgtccaatcgaaattttcatccttatgctttgagaacaatattgcgttgccggttaaccgtctcggtgttcgatgagttgaaaaattatacactaaaaagatacatactattcaaagttgtaaaagagactcttagctaagggaagtattaacaataatcattcactttatactttacatcgcaattgctttcattaatttttgataaatggccaaaaaaacgaaaaataactcaaaaagttcaactccagtgaatgatgtaccaacaactgctggcaaaaagaaagcaaaaggaaaaaagggacaagaaccagagccagaagatgacaaaagggccaagcaacaaagtaatagagcaaaagtgacatccacagcaagctggacaggtaaattgcctcatacaatcttacacgaaacatgtcagaaacgaaaatggaataaggtagagtatgatatgaagaaaatcggtgataaaggtttcattgcaattgcagttttgtcattcactgacccaaagacaaaagaaacattgactgcaagaatgaacgatccaacctatgacaaagcttcaggaaaaggccttgtaattcctcaagaaactccaattgaagctagacacatggcctccactattgcgctatatcgcattgcatacaacaccaacctgcacatgatgcttccgccaaaccatagaaaaacatggtatgccctcgacgattttcgaaaagataacctgaaaacagacgaaaagcgtataaacaaactatttgatcttgatcccttcaagacaatggtggaagacagaaagctcaaagcccaacgtgaaaaagaacaagtggcccagaataatcaagcacagaaagaacaagttgcacgaaccattttatctagccatggtggaatttcttcttctggaaaggacaggcaagagagaaaagtagcatctcataaaaactcacataatccttcattagtgcggtttccaaaaaaggtttgggaaaattctatatttgttgaccttgatgaatcgtctagacaactgatagaaacttcattgaaagagaaaattgattggcaagctaaaaaaattagccataaaaatgagacaattgctgaaaatcgggaagatctcaaggcaaaattattaactctacaatttagaccaaaacacgtagaggaagccatgctttataaagatccattgtctttcttattgtttaacttaccggaagatgatttaccaccattttttcataaaaagaaaggtgatacaaaaaacaaggttgaaataacaaacctaccgttatcaactagaatgatcgttgagcgtttaacagaaattggtgtctcttcagatgaagccttattggctttacaacaaaacgatatgaatgaaaatgaagcggccgggttcttgacgagggaaattttaccaactttaaatagcaatacgaatgaacctgtatcagaaactgaatctatagaatgttggaaccaagagctagagagcctagagagcatttatgagggctgcgtgatggacgccaaggaagattcacactacacgctcaatttaattgaaaaactcaaaataaaattgaaagtatatagaaccaaaaattatcctgcatcattacctggtattgtagtttcaacctttgataaaaattacaagctacctgattatattaagaaacaaatattaaccaggttactgcattatctccaggaaggaaatctaataggcgatatgttagtatatcatatttatgaatggttgaaagagaatatatctaagataattgacaaccctggcccattaattccagattcagattcgaaaggtgcaataaacaaaagaaacatttcaaacggtaagagaagtataaataattctagttcgagaaaattcacaaaaaccaccatttctgaagacacgctctctgtcctaagggaagagtacacaaaaaggatcaaaagttctgaatacaaaagtatgcagttagttagagaacaactgcctgcctggaagaagcaaaaggttattatagatatcatcaataaaaacgaagttgtattgattactggtgaaacaggttcgggtaaatccactcaggtcgttcagtttatactagatttcttacagaaggaaaaaggagatttcggtaagactaaaatcgtatgtacgcaacccagaagaatctcggctattgggcttgctgaacgtgtttctgatgaacgctgtgtaacttgtggggaagaggtaggttacgtaataagaggtgtcaataaaaccaaagcttccacacgtatcaagttcatgaccacaggtgttcttgttaggttgttacagaatgctagaactatgttagaaaacacaattgttgttattgatgaagttcatgaacgttctattgatactgacttgatagtgacattgatgaaaaatctcttacatagagttcgcggcatgaaaattgttttaatgagtgctactgttaacgttgacttgttcaaaaaattctttccggggctagcaacatgtcacatagaaggacgcactttccccatcactgattacttcttggaagacattcttagtgaccttgacttcaagatcaagagagagaaggctttgtcttatgatgatgatagcgttgatgaaagaaataatgacgaccaatatttgaagccgagagcagattctaagttttttacatctgggcaaatcaattatgatttgctttgtcaagtggttgaatatgtacataaacgcctgaaagctgctaatgacaacggatctattatcgtttttttgcctggtgtgggagagattaataagtgctgcaatttgctagctaataaatcaaatgaagcagattttatggttctacccttgcactccgctctaactcctgaagaccaaaaaagggtgttcaaaaaatatcatgggaaaaggaaagttgttgtatccacaaatattgctgaaacatctattactatagatgactgtgttgcaactattgacacaggccgtgccaaatcgatgttctataatccaaaggataatactacaaaactaattgagtcgtttatttcaaaagctgaagttaaacaacgtagaggtcgtgctggtagagtacgtgaaggtttatcttacaaattattttctaaaaatttatacgaaaacgacatgatatcaatgccaattccagaaatcaaaagaatcccgttggaatccctttatttatctgttaaggctatgggtataaaggacgttaaagcgtttttgagcacagctttggatgcccctcctttaccagctctgcaaaaggcagaaagaatattaacaacgataggacttgttgatgagtccgacaagtcactcacacagctaggtcaatttattagcctgatgcctgtcatggatagtaagcatggtaaattactaatatacggcattctgtttggctgtacggacatttctgttttacttgtctcgatactcggtattggagttttgcctttcatcggaggttttgaaaatagggaaaagataaaaaaactgctatgtaaatatgaaagtcgtggggatttatttgcagtattggaaattgtcagagattacttcaaaatcaaagattcgagcatcaaaaggaaatatttgagagacaatttactttcctataataaaattaatgaaattaagtcatcaacagcccaatattattctattttgaaagatgtaggctttctaccaatggactataaagttggaagcatttctgatttgaataggaacgagcgaaattttgatatcctaagggccattctcacgggtgcgttttatccacacatagccagggtgcaactaccagatgtaaagtatctatcaacaagttccggtgctgttgaaaaagatcctgaagccaaaatgatcaaatactggattcgaagcgaagagtatcaggacaaattagaagaatataagacgaaaatttcgcaagagacgcaaaaggttgatttggaagatttaccgttacctgctactagggcattcattcatccaagttcagtcttattttcaaccaattcagtaaacttggaagacgctaagttactctctgaggtggatggtccaatatcccgtcaatccaaaataccaaccgttgtaaaatacccatttgttttgtttaccacgtctcaagttactaataagttgtatttgagggacttaaccccaactactacattatcattactattattcggaggggcaatctcttatgacattggaggtactattcattcaccgggcatcgttgtcgacaactggctcccaattagaacctggtgtaagaatggtgttttaatcaaggaactgagaacacaacttgatgaggccataaggaaaaagttagaaagtcccgattatgctaaaaaatctcaaattgataattctggtgctgataaaactctaaaaattgttgaaaaaattatagcttccgaacaatagtaatcagttcctactgtagtccctgtataataattatcatcttcattttcgaaaaggaatttttttaacatatagaagtgtcaaagtataaaacactaacaaaaatctaagagattattgcgactgcgtgtttttctctttgctgaatcagggctagaatcccgtaaactacatagcacattgtctttgccatattttaaaaattttgtggcgccgtcaaaataaaaaaaaaatactgaaggatgcgaggttcgaactcgcgcggacaaccgtccaacagatcttaagtctgccgccttagaccactcggccaaccctccgtcgataatacaacaacaaggaaatacaggatacgaacaccatccagtttaacttgattaatctttacgcatgcatattgctacatcttttttattctgcaatatacatctgtttatatctcattaatgttggtaagcctctgaaaaatttatcaaatactagtacaattgtttaccaacatcattttcgttgctagaaaattactatacaccgttaagaaaagacataaatcatgagactaatagaacaacactagggattagccaatttaatgggagctgaaatgcagggattaattatgcaattacaaaatgaatggtatcgtttgaaatgaaagaagaaacactaatattataacatagaaatatcgatttcttcctgcgaattcccatgtcctcgttgagaacttctaatatgttttgtatgcctaatattatagctttacaaaaaaatagaatctcaacaattatcccacaattcactcatgtcatgctgcctctcgcgtattttttcttgaaaccgatgctagtttagttgtctttcggcatcagctctaattttttcaagaatagtatctacagagtcaaatttcatcattcggagaattccgatgaatcggcatcgtcagagaagctatataagaagagataaacacatttgaaagataggatatactttgaaagtgttctggtgaccactatatcacttaagtaatacctaacaaagcaatggtacaagaaatcgatttaggtttgacatgtgatatgcatgttcatgtaagagagggtgcgatgtgtgaactagtcacccccaagattagagatggtggggtttcaattgcttacatcatgccaaatttacaacctccaattaccacactagatagagtgattgaatacaaaaagacactgcagaaactagctcctaaaactaccttcttaatgagtttttatctttcaaaagacttaactccagatttaattcatgaagctgcccaacaacatgccattcgtggagtaaagtgttatccagcgggagtaacaacaaattcggctgctggggtggatccaaatgacttcagcgcattttacccaattttcaaggctatgcaagaagagaacctggtattaaatttgcatggggaaaaaccttctgtccatgatggagacaaagaacctattcatgtattgaatgcagaggaagcctttttgccagccttgaaaaaattgcataatgatttcccaaacctgaaaataattctggaacactgcactagcgagtcggcaataaagacaatcgaggatataaataagaacgtgaagaaagccactgacgtaaaggttgctgccacattaacggctcatcacttatttttaacaattgatgattgggccggaaatccggtaaatttttgcaaacctgttgcgaaacttccaaatgacaaaaaggctctagtcaaagctgctgtatcagggaaaccatattttttctttggatctgattcagcacctcatcctgtacaaaataaggccaattacgagggtgtttgcgcaggagtttactcacaatcttttgcgatcccttatatcgcccaagtttttgaagagcaaaatgccttggagaacttaaagggctttgtttccgacttcggaatttccttttatgaggttaaagatagcgaagtggcttcttcagataaggcaatattattcaaaaaagaacaagttatccctcaggttatcagcgatggcaaagacataagcatcatcccatttaaagcaggtgataaactaagttggtcggtgagatgggaacctcgttaatatgcaacaatatgtaggctcatttgagagtatagaccatatatacatatttatgggaaaaataaacttaccttccaatagaagttatagatgccatcatcatgcctattgttatggtccgtatctctttacagaagttcacagccaaatgcgttgatatggtatattttttctcttcagttttttatcaaaaaatgccacaaccttgatttaatcttgcatactaacatccacatcttgagctttttgcttttcgtcattgctttcttcctcatcactttcactactattattcagcactccaatcatcttattgtaaatttctttatctttcgcactcaattcatttaagggcaaattacctgagttcttctcttgcagccaaaagaagtacctttcgttggatgaaaaaactaaagcaaatattctgccacttttactggattttattggaacccacatggtctctccaggaattaaaatcaaagaaataggatcaagttccctcccgaccggcttttccgttggacgccactcgaaatcccaaaatcccaattcttcctcttcatttggtttgatctcgatttcaccctgaactggaattggcgtacatagacgtgaatcttcgttgtattcacaaacaccagccctgaatttaattacagttgaactcatactcatcaacactcttttaaaatttataagtcaaccagcacttaggtagttttctggcacccttatagaacctaatctactggtcatagtagagtatttagtagcaaagctttcgccacctcgcgaataatatatcacgaaatacggaggaattttaactgaaatatatcaataacgcatatcaaggaggggatgacttgatgagttgaaaataatataaatggttcaagcaaccgtttgtacaccactcagtcaattattgcttcaattgaaattatagaggaccgaagattagtcatataaaacaggggtctttttttctttagggagattactattacaatgtcgcaacaggattcacagcgctggctgcccacggatcggctaatatatggtgtgctagtcaaatctttccttcccttacaaaggtatcctgagctggtatatgaaaacagcaattatgcgaacgtttatgtgggtgcagaagtttacgtcttcgaagaatctgtggataagaaatggtgtagagcgtaccaatgtttacgaccctttcctgaagaattcatatcgaatatgaactcggcgaatgatgtactgccagacgtgaaaccgaaagtagtgatatttcctagaaaatatgttcattttgaagcagaaaaagccgtcagcacaatgccatttttcaaagcacctagtgctgaggattttaaaccattgataagtaaagaatgtgagtcccgctccttttgtgacagcctatatgttagctctactgatgatatatcaactggtaaaccaagaaagacaccgagacctccgttcccctttttcagataccaaaagaggtcctttaaggacgaaatgggtcctatattatctcttatttcctcgcatgtttactctatgtattcaattggcgagttttctatatataggaaaatgataaaactttattatgatttggacactatacgatttagattgtctatgaatttaaccacagaggctgagaaaataaatctgataagagcagcaacatccctaagaactaaaatcgcaaaatttttgtcctccacatacaggaagaataaactaattgctaactctactccaagaaacccagatccttatggtttcgaaggaatttttgccagggatattgatactggcgaattgctctcatacgagatcgacaaattaagaactttagtgtcatcgtcaatgctttgtggtttaactaataattttcctactgtacctgtggtagagtccgatgatgagtcctcatctaacggactattcggcacagttagatcgagcattttggttaacttgaaagatctggcatgggatccctctatatcagatcctaaatatcaagatctttctatttgtgtatacttgagaaccaaagacgaagttttaacagagtcttttaccatgacgaagtcgtccaatatggaatcagctctagatgaaattcctgcaatgttattcaagaatattttggaaacgatagtccataaaaataaagtatacttagtagtagtgctgaaggaaacaatagcaattacaacagaaactgctccggaaatttcatcttacaatatatctaccgaagagtcaagttcacattccccattttctccatttaattcatcgactgagaataagattgaccacgtaaaaaagggcttagctgccggagttattaacatatctccggtattcaagttttataacggcctatcagttgcgaataaagctcagaggtttaacctttatctttatagctccgattcctcggattcgcaaaacttcaactcttcaaaggatgcggatttaggttggggcgggttaataaataagataataaaagattcttctgaaggcgtttctgtgaaccctagggctgtttctttatcggtaactgtaaaggaaattataggcaaacaagaggcggaaaaagtgctctccacatctttagtaccgataagatctattcccacatacttttatgataccatgtttagccaagcagaaagaatttatctgaacttaggtagggtgtcgctttatggacttcctgcagctgatacaaatatagaaaatgttaccgttcaaatatcctgcaggaataaggccgtaaaattttgcaaaaataagctcgaagagagatctggggactggaagtttgtttcagttcgtccaaatgagagcataggcgaatcgattagaatagaaggggtagagaacatgaacgaagacgagacattaagagtattggtatatttgaatggatttttgatggcaaaatcaaatatacatatcaagaaaaagaacgaaatcatagaatatagaaagggtaccgtattccaaataatgtcatccaaatcagtacctctaattcatttagagcttgaagcatcatattttggtcggagatataatatcaaccctgccattacaaatttcttagttcttcaaaccaaaaatgttgaattcgaccagcaacttaaagagcactattcagttacattgaagcagctgaataacgtttcttttaaagatttactaaagcattttgacacaattttagcacactatttgttacttcttgaatcggtgaatgaagctactgataaaaaaggcccttcttcaagtttacccaatattgtattcagtgaattcgtcaagtttttaaatttaatgttaacacaccaagaaaactctagatattggtttaatagactgtacaaaaaagtcatgtcaaaggaactagaatgtcccaatgttgcaccgatactaataaaacatatgacaacgatctttgataggagtcattcttcttggactagaacaggaactgcaatctgccgaaccatcctgtacataattgtgttggcaatcggttcgtctcattctgatgaaatgcctaatttcagtcattttttcagaagcttgcacaaatttttaatgcttgctgatgagccaataatggcggatcaaattttgttaatagaaagtattccctctatgctggagacaatgaccaatcactgtaaggtggaagacttagttcgttttgcgatcggactgtttgaatgttgccaggaaaaagaaatgaatcaaaaaatgtactccaggccactctcagttcgagaagaagaatatttgaatacaaagtttaattgcctgttgaagttaattaacaagaaggttttgcaaaattatttaaccaatacggaatccgtagataaactgaggttacagtttttatctaaaacccttgagtggttacttacgccgtatactccaggcgatgacaaatgttttcacgtagaatccttacgcttggttaattctgttttcattacaataatcgaagattacaaatttgacatgctacaaaggaacttgataaggttactaccatatttgtgtaagtccttcgtccatttaagaaggtactgtaagaaagcacgtttaatgaggcctcgaagagtttttaccatgctttttcccagagaaattccatgcaactacataccggttgattcaatagtgaatgatgaagtagtcgtagaagttcttctagagcttgccatcataatttgtgaaataacgaaaattgcatcaagcagatttccatcatatcaatctttcagcgaaatcataaacttgtgcgataaagacactctttttcaatcaaatttttattcacgacaaatcacgaatgaaaatgtctatacaataaccaaaacagtttttttgttttttaaacaagattggttcccaggaatgaagtggcttggcgtatcagcgttattaggaagatcgtctctaatattgcttagtttatgcaaggattatatcatagaaaataattcaccttctccatcaaaggagtctgaaaagagggttgacatgcgactttgggcagaatatgtaaaagtcatactactagtttcaaaccataaaagtgcatccttgactaagttagctattactccacgtaaggccgtttatttgatatcgggtgacctgaaaaaaatttcagcatatatcctaaatgaatgttgggatgccctagccactgggcactataatatcacttatgctaaaaagtatggattaggagccttgagtgattgccaatttgaattgtttgttcataatcaatttttgatacgtgagatctttatttttgctttccatagacatatcgatgcaacaagaatttgttgcaaaatactatggggattagggctaaatttttggaggatatttgggtccctacaaccagcagtgaacgcatgtatcccagaattattcagcgcataccaaatcgggaagcttcgtttgaatgattacgaattggaaaggtttgtttcttgtttgttttttatgatgcacgttcccgattctgacaccttttttcctgcttgtatggatttcttaagagatttacttggttttttgcatattgtaaatgaaatctacaaaatacctaatcaagaagaatttgatgatgatcggactgctcggcacatagagatgttcgagtacttgctagaagcaaacaggccagagttgtttcataaaatgatatatgatttgtttatccactttattcagaaaaaagactttgttcaagcagctttgagtctagaactcttggcaggtacgtacgcttgggattctaatgatactcttgaagcaatatctttcccgccattgccagagcaatcttcatttgagaggaaggaatatcttcttaaggaatccgcaagaaacttttcgagaggccaaaaaccagaaaaagctttagcggtatacaaggacttgataaaagcctacgatgagatcaattatgatttaaacgggctggcctttgtacatgaccaaatagcaggcatttataccagattacagtccattgatagactggttccaacgtattttaaagtttctttcatgggatttggttttccaaaatcattaagaaataaatcgttcgtctttgagggtctcccatttgaacacattacgtctatgcatgacaggcttctacgaagctatcatgggtcaaatattgtacactcacaagaagaagtggatatgttattgatgaatcctccaatgggaaaatacattcatgtagcttccgtcgaaccgtgcttaagtatatccgataattacaacagtagtgacaagaaaagctcaattaacaacaaagtgcggatgtacattgagaatagagatttgaggactttcagtaattctcgacgtttgccaggcgcaaaaggagtcactgacctgtgggtggaggaatatacgtatcatactatgaatacttttccaacactaatgaatagatcagaaattgtaaaggttacgaagagcaaactttctccacttgaaaatgcaattcgttccttacaagttaaaatacaggagttatatgggcttgaaaacatgtgcaataaaactctgaaggaccacggtgatgtgaacgatttatttaccgagctttctacaaatattacgggaacaatatcagctccagttaatggaggcatatcacagtacaaggcctttttagaaccctccacatccaagcagttcagtactgatgatttaggaagattgacgctagcttttgatgagcttgttgcagtattaggtcgctgtctaacgttgcatgcagaactactaccatcaaaggatctaaaaccatcacatgatcttctagtgcgtctttttgaggaaaatttcgctgaggagatagaaagatatagtcgtactctcagtgaggccaatcgtagcaggaataacatgattactgctcgaataatttcgcacaagaaccccaataaaaaggcaagcttttctggaagggatcatcacacctcagggtccaatcatagccaatttgtattagaacatagcgactcatttggcccaaacagtttactttttggaaaatatttaacaagaacgttatcccactcgtccactacgagcagtttggataaaagtggaattgtttccggcacttcgagcacctttttggcagggtcacagccaaacaccaacacagattcacagcacaagcatgattactcacattcgggataatatgtcagaagttgttcactataaaatatacgcatatgtaatcatttatttattcattcatgacttttagttgaaaagggcacatttttctttgtcgtaaaagtgaagaagacagcgaattttttcctttctccttcaagtattgcttttttgataaagtatttttcgaaatattgatacaattattgaatctttgtaccgtatcctttttttccttttttctaaggattcttcacgttgtaatttaaagtgtacagggaagaaaaatcgtcaattttaccgggccagattgtctcaggaagataagttccattttccgctataaaattctgacgttcttcctggtcctgagcatctaaattctgcaactgcttttcacaatctttcaatatagttttcattctgtttgccacatcctttctcctctttgcttctagaactaagttaccgtagctttcttcaaaattatcataaaattcacaaagttccttagttgtttgaatatcttgtgtacaggaatttttgaagctatcaatcagattggaaatatctttaaagattaatagatattccaaatttctattgaaatcgtttattatttcagaaacttcgctgtgtagttctgtcttttcctttatttttgcctgcaaaaattgacccaagttaagaattgttttgtccacgtcatcaattacctcatgcagagttttgaaaatgttgtatagttctttgtcgtcgccttgtaccaccttaaacagctcctcacgttcatcgttatcaatttttttatcttgtaacagcaatgtcttatcaaagtgctgtgtcaatgaattcattatctctgctaaatctttttcaaggtccgttagttccctgctaaactgctctgcaacatttgtttccatcaggttatctataccaaatttactttggaatttttgagttacgtccgtcaacttggtatcaatcagttctttgttaacttttctgaccatattttcgtattgaagcttaatgttttcaatttgacgctcaattactggcacttctttcagtttgtcattcaataagttaacgttgtctctcgagatgtaatctcctagtttagagggatcggtatcatctttttctgatatgctcaattcatttactataccatccaacctttgtactttagaagtgatttcatattgccagtacttcatctcatcaactaagaccactaagacagcttgattccattgtttctggattagctttgtcccaatgccttcctttaaaatagtgtaaagaaactttccttgctgtctcaagccaactattagaaaattgagttttgaaatactcaactgccaagatgacaattttttcttaatatctacaatccttaaattagcacttgaacataaaagttgagcatcggtcagcgttttcctggcattattaacaaattttgtaacatctgcttcgttcataggtgttaaatacgttgataatatcctcgcagtatcgaatttatcgtacgttatgcgactttcaaataattatcaagttagggatatcttgcaatttttaatactgaggccttagagcgcgcatctagtatttacattatgtcaaaacaataacaaaaatccaaaatttcgaaatagtacaaccgagagaggtcgaagaacttaagccttcagtacgccaaaacatggaggattcggactccaacacagataaaaagttctttttcaaaaaaagaagaatcgattcctataattatagcgatgaggaagataataattcaagcatgaatagtgacatgacatacactaatgatgccttgaaaactagtagcggcaatgccccaacgatctcaaaattaacgaagacatatggtattggtgcgaagttactttcgagtatgggatatgttgcgggaaaaggccttgggaaggatggttctggtataactacaccaatagaaacccaaagccgacctatgcacaatgcaggtctaggaatgttttcaaataccaactccagtaactatcacagtgaaaatgaggattacttgagctctgaggatgaggtggttgaaggtatagaacaagtcaaattcaataaaacctccacggaggttttaggcgaagcgttgttaaatgatagtggtgatatgactatagtgcgaacactgagagaattgaggttagcaggggtacaattaccagagagtatcctaaaagaattagaccctttaaatgcagtaccaaagccgaaaaaagatgttgttgtggagatattgcaagagctgctgggtattgaaaaaagtttggaagctattcgtcagcgcacctctccgttagaagtgcaagtcaaagaatattatggacaagagaggcttctttctgaattggaggttactttgagggacgaaagcaagcatgtttccctgtatgataagattggtgctattttaaaattgtccgacgacgagctcatagataggctaacgtcctgcttattgagaaaagaattactaatagaatttgatttggatcatttagaaaagccaaacgatatacttgatgagttaacgcaaattatagaactactcgcatatagaatggatacaacttcgaaatttttgaacaggacacaaacaacaatctttaaagttatatatcccaaactcaaaaaattttgggaagggtttgatatgactaaatcaaaaatcgacagcgctatcaccctattactggatttccaacaagtgctaagttttatcgggtgtaaagagcatatcatggaggaattcgtctatccaaagctattacaggaattagataattgggaacttcacgatgaagtagaccatgtttcgccaagaatatgggtcttggattttatggttttaattgacgataagatcaaagacacaattgtggacaagattgaagcaaaattttttgcttattgtaaaaattggtaccatagggaatcattttgtatcactaattctgatattatatttatcaaagaacttatctgcgaacgaagatattacaaaattttatgtaaagagtttcttcctaaattcctggacgagctgtgggaaagacataatgaccccatctacgagttagaggattggaaggaaaaacaggaatggaaagaaaaagattctggatttttctattttatgaaaaaactgagaagttatacccattattttcatccaaaacagtatgaattgatgatgcggggaacctttaataatataaacaaaatactctatcaatggcatctttatagtacagtggaagacttacacaagtcaaagtggtggcttaattggctgatgaatacggtatttgagcactctttaccaacagaaatagaactatcggagatcagaaaaagctataatatattcgctatgtctcataggtaccaccttgataaatctacattagatgaagatttcgatttgagacagggtttacgaaacttaatggaaacacaagtgatcgacgatattagtcaaagcgaacaagaacctacctatactgtacaaaatattccgcttggaaaagttagcagctctttcaaggatgtggtagaagactactgcctggaaaaagggtacttgatcagcaaaataccaaataggtacactcaactgccatatggaagagaccaagattgtatagttcctttatttgagatccgaaacgggaagaaaaaaatggaagttgctttgaaacatgatattctttgggtggaggattccagtgggacctttaagccaatttatttatgggcccttgacctctagaaagtacctataaaagaggtgagataggcacgatttatatattattgtcgaaaaacaaaattgattagattactaaataaataataattgcattaccatttttagacaatggattaatttaaagtggagtctattaattccccttatttgatagttgttggtattttgcccttgaaatgtttccaaaatttattgtttaaacttttatacttcgctagactctcgtagttagactgttaagagttgtggcagaaggaaacgagtttcggatgggatcaaaggaccttttttatatcaagatcaaatggagctgttattttccaagaaagacagaagaaagcccgaatgtggctaagtagtgagcctaatcaagtagtcagcttcacttgatattagtttatacgattactattttaatggagtttttagctcactaaataatttaatgcaaaaaaaataaacgaccccagtgagggttgaactcacgatcttgcgattaacagtcgcacgccttaaccaacttggccatggagtcttttatttccgatatctgctgagttaaaaattatataatattattgatagcttctatcattgaccttcaattacttatgttggaatatcaaaaatgtgagattttttttttcaaatagttttgaagaatcagcgaataatttgatactttttgggattcttgttagtaacggctattgttggagttaaacttctttaaatttgtagagtatgtggattttgatgtaattgttgggattccattgtgattaaggctataatattaggtatgtagatatactagaagttctcctcgaggatttaggaatccataaaagggaatctgcaattctacacaattctataaatattattatcatcattttatatgttaatattcattgatcctattacattatcaatccttgcgtttcagcttccactaatttagatgactatttctcatcatttgcgtcatcttctaacaccgtatatgataatatactagtaacgtaaatactagttagtagatgatagttgatttttattccaacataccacccataatgtaatagatctaatgaatccatttgttagttaatagtttaaatgtttttatcggaagaggttttgtcatcacatcagcaatgttcttcttggtctcgatgtagtatacgtataaattattacctgatacttcatctctaagtctcattgcctttgtgccaaaaaatctgtttctaaatttctcttcatttatttctagttcatcctggtctatataatgacctggttgacctggagctctaagtttctttccttttgggttcaaaggtacgtttagtttgggtaatttttctgtcaaggatttttccatacctaatttcatgtacttgcttctttgatatttgatctctaatccaagtatgtcgtactgaatttcgttatcaccttcacccagatttattatctttgtatcgtattgtttcttgagtgttgttatgattttcttatttgcatttaagtctttgctgaataatatcatatcatcaacgaataagcaaattgttacttgactattcttaaatacgcatgaccatccgcgaacttcttgcatgtcgcaacaatttattaaatatgatttaatggtttcataccagtttgcaccactttgtttcaaaccatagagtgattttctcaaacgtagtaacttatcattcaaacctaaatgtggtggaggtcttatgtataattcttctttgatatcagcatataagtaagcagaggatatgtccagctgtgtgatataatagtcattgtctaatgcgattgacaatgacgtcatcagtgcatagtgatgtacggtattggattgcatatcagaatcatatgtatcggggtgttgaatgtcgcttcttgcaacaaatctagctttgtgtgtaccatcacgtttcttgttaaatataaacattgagtttattacttttttaggatctatgtcatttctatcataatatttgtttgtatcccaagtgttcattttcaatagttggctaatttctttatgataagcttcaacatatctgtctttttctttgttgtctttattatatgtaattgcttcatcatatcttaaggtcgttcgaactggtttgatcgatttcactccttttattgctgcaattaaatttatgcgtttcttcgatcttggtggttccagacttctcatattcttattattccatgtgtctcgggatacctcaatttcagtttcattatcttctaatgatcttttcttacttttggtagtagtcagaacattagaatcatccataccacccaaactggaattagtctgacgagagtgtatgtgtggaatatcttttgaaacatcagaagtgtccgtaggagatttatgggttaagtcaggaagtgggaggtcgtcaagaatagaatcagccgtaacattttttgaggatttgtcaggcattatattaggagtcgcatggtcagaagatcgatattctggcggatccgtatcaatggagggtgtattatcacatacagcctttgtttctatggagatgatgggagtagtggattcactgttggacgaacggtcatctattgagggcgtactatttgtagtcctgtatttgatatttgtatcactatttcgttgaatatatggttcctccgtaccacccaaacgtgtagttttgatgttttcaagtccataattaactctatcctgtgaggtcaaatcaatcatctcattggtactaccaggtcggttttggtttcgtgcagtgaaggtagacgagtgtctaggtgaagtagtatctgattcaacggtaccacccatttcggtactctctttattaatgatatggggtgtacgagatcgtatagtagatggaagaatattgtattcagatatgtcggcatcaacttcttttggtgcacgtactttttggactggttccttgtctaattgtaaagggtttattgattgggacgagaagtcgttcactagaggatcagagtttatttcaatctccgattgatagtcatgatcagattctttattttgatcatatgactgctctgtttcattttgttcaataaaagattggttatgggctgttaaacgattgagatcatcatcaaaagtgagtgtatcgtagtcgaactggtccaatttcgtttgcttgttttgtaatataacgtaattggtagtatctactgtcttttttaaggatggaagatagataatatagccataagagtttcgtgatggatgtaaggcgtaacctggaatgccacgaggatgtattttcgagtcgggattatggttgttaactataaccggttgaccgaaaggtagtatagtagtaatgtccagtccagctaaacctgcatgttgtcttgcagatttatcgttttttggtgagactaatgaatttctgattatagtagaaaattcgactgctgagaaccatagatgatttggtagaccactgcaatgaagcagtgtgcgacaatcgtttaataaagtacgatttaatcgttcagcgacaccgtgtgctctagaatctgccgtggttgtatagcatgcagtaatacctctgttcgtaaagaacttatgaagagttttgttagtgtactcggagccacgatccatctggataactagaacgcgagcattgaattggttcttaataaatgctaatatcgatgtaaaaacattgaggatagattcttcacgacggtcgtgtaatgggtacacccattggaatctggttttctcatctgtaaacgatataaagtaagaaggtgcacttttcggtaagtgatgtacaggaccaaatatatcggtatgcaagtactgaaaaggctcatatgattcttggtactttagtcgtgatcctttgacatgcctatgtttcgtgcttttgccgattagacagtcaggacattgatatgtgctagcgttagaccattcaatatccgattctttcaaatatgtaactgcattcttcttaagagacttctgaatacttcggaagttagcatgtccaagcattcgatgtattaacggatatggatatttatttacgcttttgcttttgttgacgttgtttattgttagctttgaaatgtgcgaaggaattaggtattttttagataaccagtaaaagtctccatgtttgactatgggagctagtactgtaccatccgatctttctaaagtgtttctggtaaagcaggcagtaatattttggttagccagctcactcaaacttaatagatcataggctatgtttggtgtgtgtagtgcttttattgatgttttggtgccgttctgaaagttgaagtgaagattaccaatggcatttataggaatgtcttgtttttgagcatcgactatgtttatttcagaattgggtgttgcatggtgtaaataatgggctgatctgacaagcgtttgcgaagctcctgaatcaataagaaggtgatcaggtagttcgtcattcgagtctattgtgcgtgttggcttagattctttctgttgctggcctaagactaagttcgttgtcatcgcttaagtattgtgatgaaacggttgattcattaatgtgatcattgttcacccttgagaatttactggatgtagcaatattgtgagcttttgctgctcttggttttgaactatttgttctatgataattacgagttgtaaccttcgtgttagtcgtgtttggagatgtgcgagaaacatttttgtattcgctgtgttgtttgtattgggacggtttatttagattcatgattttattttcgtcatatattaattgaatttcagcgaataattgggaaagtttcatgttcgttttggtacgatattgattacgtaggtatttgaaatcaccggatagacctttaagtattagttgacaggccaatctgtcgctaacattgatattgttttcttttagcctttgaatgatcgtgctgactgtaatttcaaatgtatcagcagatgtacttccgttgtactcaaggttggcaagagctatccaatcttttaattcttgattgttagtttgcattttggacacacttttacaaaggacagtaaggatgtcagaataattaatttctaaaatttgttttacccatgttggcaataaatgaaatggggcaaatgcttggaaggtattgtatatatacgcatgttcttcataagtcatttgtcttttgatttcaccctggtcatttggaataatgtcaccgagattagagttcttcaaaaatctgatgtaaaatttaacccatgtagaaaagttttcttctgatgttaaagtgtgtggtggtaagacattatttctcacctttgtcttagcttgaggtacttcagagtgttgatcctgtgaatcgattggatcaggtgaggaagtactcagcggtgggatatactgtggcagcggatagtgtgggtccggttgataatacgcaggtgacgtttgataatgtgaacacgtcatcatagatggttgttggtaatgtgcccagttagaagccatagctttgtttggggtcatcatgccgtgctgttggtactgtccattctgtggaggtggtactgaagcaggttgaggagagacatgatgatggttctctggaacagctgatgtcccaggtgttgtctcttcttgagaattaaccttagtggaatctctatcaaattccggtaaattggaagctgaaacggctaacggatcttgatttgatgggacttccttagaagtaaccgaagcataggcgctaccatgtagagaatgtggattttgatgtaattgttgggattccattgtgattaaggctataatattaggtatgtagatatactagaagttctcctcaaggatttaggaatccataaaagggaatctgcaattctacacaattctataaatattattatcatcgttttatatgttaatattcattgatcctattacattatcaatccttgcgtttcagcttccactaatttagatgactatttctcatcatttgcgtcatcttctaacaccgtatatgataatatactagtaacgtaaatactagttagtagatgatagttgatttttattccaacaggttcacacgaagattgaaagtgtggccacgctaatttagtttattagggaaatgctcctggtcagttctaattcacccaacgtagcgcggaatattttaaagttaatatagtatttcgatatgacaagcacctctaaacaaaaggttattttcgcttttgttcattgagcgtgtacttcaagcctgatcctgctttttcttctgatttgatctgattcgattaagcaagcggtactaccctaaaaccgccatctgttgtaatatagtaacgtcgcaataaacctgtcatataattagcagctaatccttatattccatctcctcaatttgtgatatttatcgtatataattcccatttcagaccgtcatttagtagtaggcatctaactatggaacggctttacccgatcttggtatgtatgccataatgtactaccgctatcgatttaccttaaccctaacgagtgtctctagccagtattttaaacttccatatcacaactaatgttgaagattgtataataaaaacatcaagctatttaatagatgcgattaatctcctaatcgaaaacagtttgttcggtgtccaaatactgttttagtggactatgataaacgttataacagctattttgactaaaacaaccgtaaatttacacagataggtgttcacagtaattttttggggagttaggtcgaaatcttttccaaaaccagtcatgcaaaggaaatgcgtcaacttttggggacttttcccctactcaaacacagttagtcaacatttaaaggttgtgtctttacttaagagaaaattaactgagcttcggtcatacatacgtaatttcgctgcttccagtcgagcagttggtgcgctataatcatttgatgtttttagcttacggcttcttaagattttctattgttcatactgactcgtcgcataggccgcaatataaatcatttagagaaaacgttaacacatcgtttaggtaaacaacccctagagaggatgatcagtacgcaatataactgttcaaaatccatttcttgcatcaatattttattcaactattatttctggaggttttagtggttctgtataccccctccagccactgttatgaacaattaattgatactacttcgaatataaacattaaaacaaaaaacttattgagtgcagcaagttaacatgtatcgatataatagaagttccccttttgaacgaacaccagaaaaacgagtaagccgtcaagaaagccaacgaaagagcatcgaattgcccaaactgccaccattgaatacgaggaactcctttttggatgattctgataacggaacagataatatctcaattggctggacaccaatcagtgacacccagcaattccaaagcccggtccctcaggcttttacctttacatcaaaacatagtgcaaggggaaacggtactagctcttcagaatccacacccaaatcgacaaagtacgtcaaagaaagacgaccaccaccaccgccaccccttttgtattccactgaatcaatacggatagactcacccatggtatctcccagttctcagtcccgggaaagatcacctaataaactatcctttataggaaactcagaggaacgacatcacatggaatacatatctaaccattccaggatcttaaaatcaccatttgcgaacggatttagtccaaattcccctaaatctccaagagatagtagcaaacagcaggctcacttctctgatgaatcagatctacggtgtcatgaaagagaaaaagctttacccccaattcctttcactactactcttctgctatctccttttgatgatgaagactcagaattttttacgaaaccaccaccgcctctatcaacatctagaaacgtaagtgggaatagccgagtatcagaagccctagaaagtgtttattctgactcagattatacttttaataactcaaatgccaggcaaagtagttttaactctttactaggagccaagccattagaattagcaccaagcattactgcaccgacacaaccattttcaattcaatctatcgatgagcacaagctttatcaatgtgataatgtttacaaactttctgctatttatgagtggattttgaaagtttattttgaatggtttaatgaatgtgtcttcacgaaaatcgatcttttccaaattgttcaattacttttagagtttcaaatgcctacaaatttcgatcaagatacgatagactcaaatgtggataatattatggcttcgtttatttcccagaaagcagtaagattcgatatcattaacgatgaagaggtagccgtagttgtgggagggctggatattactggtgttttcaccgaactactaccgtgctattcattcatcgataatacttatggatctacaaactccctgatttgttattccaacgtttgcacacatggccaaagctctggcttcagaaaagaaataaaactttccgaaatcataaataaatcagttggactttggacagaatactggcacttgactccagatgatttagcagaaattaatccccgtgaagtacaaagacaaagctttatatttgacttaattattttagaagaaagatccttaaacatggctactgccgcggtagaaatctatgggaaacggtttgacaaatccctacttccagatgagcctgagttcaaggcattggcatttgatatcttcgaacctctaatacaattacataccgaatttcttttgacgccaatattttggaaattaaaaacgagaggtaagtttattgatggcgttggaaaaatctattcaaaatggtgtggtgaagccaagaatatatatttgaattacgcgaaagctatggcaacggtacacgaaatcataatgtgggagaagaaaaacaagacgaaatttgtaacatggcttaaggagattgataactcggttgaaattacaagatcgaagatgtatcatgatgttatattctttggggggtttttcaaatctttacaaaacatgcccgtaactctgcgctcaattttgaagaacacggatccttccatggaggattatgaatacctgaaaatagtaattaaggaagtagaaaagttgaactttgaagttaatcaggtacatggattagcaattgaccataggaaactagtaaggttttcgaaacaattagtattaagtactaatagtagtaatgcaacaagctatgtgaacgtcggtggtagtactaacgcaaatgacgatgatgcaattcaggataaactagctcttggtttaacttatccggaaaggaagttagtactatctggcactgtttataaaaagagggatttatggctggacccaaccccagtgtatatcgcattattggacaattgcttactgattacagaggaaataagtaaaggagaaactcaaaaatataagcttattgaaagacctatcccaatagattatttaagtctcgagaaaaggaaaattccaggaacaagtaaacagcctctgagaaactactctcagaaagaacataaatccccaatgcataatttttcgacaccgattaactccatgagacctctgcttaaaagttctggaaatcacatgtcaacagcgtatggagatagaaagactagtaatactgaaatttctaacgcgaatccaaacacagacgagttctcatttaagatcagaaatacagccacaggtgaatcgttcaaattttttacagaaagtgcagaagtactcaaccaatggattgatgctatcatggaatcttttaaaagaaatgcagaaaatcatgatttaaatgcctttgaatttacagtgttgagctctgagttcgcatacttcgacaaggatgcaccggtgaatctacctgtagctccggaaggatcagaaattgatgtagcactcaaagcttacgctcaaaaagcaaacaaagattcatgttcatggagtaagacaacacggattctttgttgtgaagatgttaaattcgagggcagaatttacctatttgtggctacaacagacggtatctatgtgaaatatagagacgattatggtagtggtttcgttaaaatattagaattaaacgacgtcaaaagaatggaagccaatgttaagttggggctcttgtttgtattggataacagaaagttgtgctattttaatatctcaacggtagtgagccgttacctagcgcaaggaaacactctagatgaaaactgcattgtgggaacagtaatcagagataaggtgagattcttcaaaattgctgatgattttggtaactcaaaacatttattttttgaaagaaaggggaagatagttatattaacaccagaatttgatcaattgacaaaccaagtaaaatatttcaaattttacaaagagtataagctcccaagttcaagtaataacattctgaataacgaaattgaggatattgccatattcaggaaaagttttgctgtgtgtacaaagaaaacagtcatactttatcaagattcattcgaggataacggaatagtcttaccatcttttttgaatgataaagatatgatggcacacttgaggcatccacatttgaatagcttaccgttcaaaagtgctacagactccaagaaacgcccctccatagaatctctcactgaagaagcaaaaaaggatatcgccacttgcaaagctataccggtcaatttttttcaaatatcacaatctagtttttttgccttggtttatgatgaagccgtagtgaaaataaactgctacggtgagatgtctgattggagaaaggatattctcttacttgatttttgttgtaccggcgcgagcttccatggtaatcatttgattctcgttggcgacaatttgatacagatttacgacttaaaaaatgttgagcagaacctaggcgaattggttcccgtccagatcataaaaggaaagaagataaagctggctagttcagaaaggagagagaaaacaattcttgtgttaagtcatccaaatatacttaatagacaattattagtcgcgtgcaatcctgtagcaatggcagatcatcaataatataagatatagacacttttaatggtaaatatcgttgtaataatataagccaacaagaatatagtccagtaattatgctatttgcagtaactcacatcattattctctctgttcatataatcctgaataacaggttaccctcggaagtgcatttagccgtataacaagtagctctttaaaatcagtagaacagatacattaatatgtgataatacggctgtgaggaaaaggtgaagttctggtgatgaatatagactgtttgtgtcgttgggtagttctgccactgctgcgctatccacttctggtagctcttgtattgagatggtatgtaaagtagaaaataggcatgaggttagaaacagcgttttttatactaacatgacgaactaacctaggtctctaagcgactcgataagcatttgtctaacaatctatacactactgataaatgcattcctcattgctaattcctatataaagcggtcgggacaggtcgcctggaagagccttcgtgaatttaagaatggcatagttcttattactggaggaagtaaaggacttggacgggccatagtatctcaactcctacaagactacagcaacctgaccatcttgaatgtcgacatatgcccatcatcagtgaggaatactcgcgtgaaggatctcatctgcgacctgagtgatgatgaagaagttgcagcactactgaatttgttgaaaagaaagtataaaaatgaaatccgattgattgtgaacaatgctggagtaagggccaacttcaccggattcaacggcatggaacgggataatcttgataagatttttaagataaacacatttgcaccacttcagttcattcaagaactggcccctagtagacactcaactagacagtgttatattgtcaatatcgcaagcattttgggcatattgacgccggccaaagtagcagcttatgcggcgagcaaagcagcattgatagcctttcatcagtcgtacagttttgaattgcaaaacgaaggcgtaagaaatatcagaacactattagtgaccccagggcaactgaatacggaaatgtttgcaggattcaagcctcctcgccagttctttgcccctgtaatagacattactactctagctgccaagatagtccgttattgtgagctgggtcagaggggacagctaaatgaacccttttattgtagttttgctcatcttttgatgtgcgtaccttattcgctacaacgcattgtaagaagcttctctcgcatagattgctgcctcccggacgagtagaaagctatacatagtaaatagaatatttatagatgaatccgagtagacagccttggtgtttgcttatacattctttgcaattatgcacgccctcattaccgttgctcatatttttgggcattaattgtattttgaaaagtgctcgttcaggcccgtgtaaaaaaaggtgatgaagcaaacattataataaacacttctgagaagccacgtgtagaggggtaagctatatcgtaaacaccgttggatgtggaccacggtgcactgataaaataaagatatagtagtagaatctgttactaatcttaacacttttgatggtagaaccggacatgcagaagaaggcaagtggtggcagtggcggttccgagatggatactttaaatgctaccagcaacagtagtaaacaaggagtttcaaataataaaaggaatccggtcagtaaaaagaaaccagggaataaggtctctgatggaagagataatgcacataattatcacggggaaggccgcagaaaaagtagcaaacaacagaggtcaagaacgccctataaggagactagtactaggatcaatgatcaagatatagatttatctatccaggaagaaattcttggtggtaatttcaaattacgaggcaggaaaactcaagtttccattaatcatttgttgaatttccagttacctgaagtcgaaagggaaaaaagtaggtcctcttcaagtaagaaatcgaataggagacgcgatgagcacgtacatttacacggtgacacatttgttaatgttaattaccgtcttttggtagatgatcgttttgactacccagagcaaaactgtaacccgaacgttcctgtcgatcaagaaaagattctaagagtcatagtgccaaagggtcagaattgttctatttgtctgagcgaggaaccggtggctcccagaatggttacttgtggccatattttctgtctaagttgtctcttgaactttttctccattgaagaaaccgtcaaaaataaagagactgggtactcaaagaagaagaaatataaagaatgcccgctttgtggaagtattattggccctaaaagggtcaagcctgttctgtatgaggacgactttgatgtaaccaggttaaatcaaaaacccgaacctggtgccacagtacatctacaactgatgtgtaaaccacacggttcactattacctttgccagtagccttacatttagaccctctaaaatgtggaaatttccctcccgcaaacttaggatcaataaagcattatgcgcatattatgaagtgtggcgtgtcttactccttggagctctatcaaaaggacattgttgctattcaggaacaatatgaaatcgacaaggccatttataatgatagtggaaaatttgttaagcagtcgattgaaaatatcaatgatcaaatttcgacgttgctggctgcaaccactgatttgagcccactttccaacgatattaacaacggtttggacaattttcattttgatgacgatctcttgaccaaatacgatgattcttccgcttattttttctaccagacgttggtggcatcgtccacgaaatacttcttatctccactggatgtaaaaatcttattgactattttccactattattccaagtttccagaaagcatcgagacgacagtcgaaaatatacattatgatacagtggtaacggagcaattaatccgccgctacaagtacatcggccaccttccaatcggcactgagattgcccttttagacttggactggcgtaaaataccattccttcccaaggaaatttacgaacagtttgctcatgagctaaaacaacgtcgaagaaaattcacaatgaaaaagcaaaaggaagataaggaaaagaaactatatgaaaaaaggttggaacaagaacatgccgagttctacagaaaggaaaatggcaattctctcaagtttgaagactctgtacagatggctacccattatgaatccattgtaagctcttccatacctctcaactccttaggaatttctatgctgggtccaccgacaaattcctgctctactcctcaaaagcaagcgccctcccacacgaaaagaacaatttgggggacatcaattgcagtgacggaagacgaaaaagcatcaaaggagaacaaagaatttcaagatatgttattgcagcgaataaggcaggaagatagttcggatgtcacagattcgacggattctcctcctacaagtaatggtaagcgaggcaggaagaagaaaggtaaagtcatgctattcagcagcaatcatcaagccttgggttaggttacagcatgttctgcttaaaaatctctttccaagccagaaatgtgggaggacctattctatatcatttcaaaatcgaactctatatctttatgtataacttcaaacgctattgcatataaacaattactcatatatagtccaaatgcattcataccatgttatactattcaattctagtgtcgttgtgcgtgatttttcacttttgaccgtaaatagaatttcggtgatattattttaactctcgaagaaaataaagtagattcatgtacacgtatatcaaaagagtacagtgaaaaagggataaaggatacactccacttagaagggcgcaagatgagtggaaaatttgttcgtgcttctaaatatagacacgtctttggccaagcggccaaaaaggaactgcaatatgaaaaactcaaagtgaccaacaacgcatgggactccaacttgctaaaaacgaatggtaaatttattgcggtgaattggaatgcctctggaggtggtgcattcgctgtcattccgatcgaggaagtgggcaaggctccagatcaagtgcctttgttcagaggccacactgcgcaggtcttggataccgattttgatccgtttaatgaccacaggattgcttccggttccgatgattctaagattggtatttgggacataccggaaaactacaaatttcacgatcatgtagatgaagatggagagccaattgatatcaaaccagtaaagtttttgacaggacacgcaaggaaagttggacatgttctttatcatcccgtcgctgagaatgtattagcatcctcttcaggtgactatactgttaaattatggaatgtggaaactggaaaggacatgattactttgaaacatccagatatggtcacatccatgtcattttcgtatgatggtaattatcttgccacagtggctcgagataagaaactacgagtctggaatatcagagaagaaaaaattgttagcgaagggcctgcccatacgggtgcaaaaaaccaaagggtggtatggttaggaaactctgacagattggctactactggtttttcaaaattgagtgatcgtcaaatcggtatttgggatgccttcaacattgaaaagggagatttgggaggcttctacactgtcgaccaatcatcaggtattttgatgcccttttatgacgaagggaataagattctttacttggtggggaaaggtgatggtaatattcgatactacgaatttcaaaacgacgagctgtttgagttgtctgaattccaatccacagaagcacagagaggctttgctgtagcgcctaagcgaatggtgaacgtcaaagaaaacgaagtcttaaaaggtttcaagactgtcgttgatcagcgtatcgaaccggtatctttctttgttccaaggagatcagaggagttccaagaagatatctacccggatgcaccttccaataagccagctttaactgctgaagagtggttttctggcaagtctgttgaaggtccaattctcgttagtatgagatctatctatgacggttccgcaccaagctttcatgaggctaaaagacctcaacagccaacaactcaagaaacagctcttgaagagaaaaaggagcagcctaaagtggagaagccaatcagcgaatccgaaaaggaggtgaaacaagaagctccaaaatctccctcaccgctaaagtcggcctcctcatcttctacaatcaaccatgtattaaaggaagataattcgatcaacaagttgttgaagaaatcctccgatattgatcaagttaacaacgccgaagatccgtctagggatacctccggatgggaagaagccgatgatgagccagctcctatcaaaatcgaaaccccagtcactccaacagaaactaaaaaggatcgcacacctaaggtcgaaccttcaaaagaattgaagccagagccagtgtctatcgcaacagatagaaaacaggagcaaagcttacctcaagaagagaagtcctctgagaaaacaaagtcccctgagcaggaaaaatccgcaacacctccttcttcaattacggctgctaagacagccattactgccagcagtaaggaagagccatccgcggcaaggacatcacctaagtcattgggtttaaaaaagtctgtcgaaaaactatctacattggttctgcaattagaagatgtagttgataaattaacgaaagcaaatcttgacaaagatgagcgcctgttaaagttggaacaaaaaattggcgaactgtcaaaatgaaaattttttgtacttttaatgataaaattaagtgagtcctttttataggaaagatgtattttgattatatgtaatgtacataagacggcggcgataataatgcacttagaaagtgaatcatgttcacctgtccactaacaaaaaaggaaacaaaatgttgctttcccacaggaaaaagaatgtttttgacaaaacactaagcgttatgtgaccaatgtataattgtcctcatcatatagttttatgcaagcataaataagtctttcttttagttaaaacgcgttacatagtaaaggtaaccctgaatgaatttttatttatatttttcttcgcatattttaggatcttgaaaaattaaccacaagttagaagttgatgagatcaggaattctaacaaaaggtcattggttaggtttattttgtaggtgcacgtttgcaactttattccttttgtttcaaagttatagagctttcattttctcattcttctctagtgtaggtcatttctcctgcatattaacctactagaaaagtttacgaagcttcataggaacgaataatcgatcactttaaaggcttcccgcactttaatcttatcatctacacctacaaaaaagctctactttgtcatttattttctacttcatctctgtatggcatctatctctatatatataaaaaagcgcatctgtttattataaatgaattccaacaatcctgataataataatagcaacaacattaataataataataaggataaggatattgcccccaatagcgatgttcagctagctaccgtctataccaaggcaaagtcttacattcctcagattgaacaagtttatcaaggcacaaatccaaatattcaagaggcaaaattattaggggagttattacaagttctagcagaagttcccaagggtacgcatttattttgcgaccccatacttgaaccaatatcaattttttccctaaccattttctcattcaatgaagaagctacggccacatggctgaagaatcattttaatccaattctctctgtttgtgataaatgcattctaaattttgcgagagggaagtgcaaaatgttacaacattttgccattcaaagacatgtgccgcatgaacatgtagccaagtttaatgacatcgtatgccaatggagggtggaggctgtttttcctattcttagaaatatttccgttaacgataatacgggaattaacattacaaatgaaattgaaactgcaatgtacgagtgtctctgtaatccgcatatgttgaggcttaacaagcaacttaaggctactttcgaagcaatcttcaaatttttctacgacacaaagcatcgtttgttggacgttacgaatccattaagcataaaaacctttatatcaggtgtcatattttgctggtgtgaaggttcaaaagaggaaaatgagtggtcacgagcttttctaaaggatttatactcaagaaatttccatataaatctttctaacctgacaccggatattattgaggaagtttatatccatattttattcttacagaatccggcaaactggacagagattgtggtatctcaattctggtcgagattactaccggttttcaatttatttgataaagacgtcttcatagagtactttcaggtcccaaaaaatgtggaatctttaaaaaaaacattcaaatttccgttagagccaatttttaaaatgtggtacaatcacttaagcaaatcatatcatgataagccactagactttttgttaagaggattaacaatgttcttgaataaatttggctccgagttttggtccaaaattgaacccttcacattccatagcattttggatataattttcaatagagattcattcccaatcaaactaatcaaaattcaagacaatccaattgttgagcatcaaacagaagtttactttcaacttaccggttctgtaaccgatttactttcttggaccttaccattttatcatgcactgtcaccatccaaaagaattcaaatggttagaaaggtctcaatggcgttcctgcgtataatagccaattatccatccctaaaatccattcccaaagcttgtttaatgaattcagcaactgccttgttgagggctgtgttgactattaaggaaaatgaaagggcaatgctttataagaatgatgaatttgaaacagtactgttgactaaaacagattctagagctttgctcaacaatcctttgatccaagacataataattagatcagcttcgaatcctaacgacttttatcctgggctaggtgctgcttctgcatcggtggccacatccacgatgatggtattggcagaatgtatcgattttgatatactgttattatgtcatcgaacgtttaagctttattcaggtaaaccaattagcgaaattccaatttcaaccaacgtcttggaaaatgttacaaataaaattgacctgagatcttttcatgacggtccattgctggccaaacagctgctagtatctttaaaaaatattaatggtcttttgatagtaccgtcaaatactgccgtagctgaggcacacaacgcattgaatcagaagtttttgctgctatcaacgagattaatggaaaaatttgcggatattttgcccggtcaactgtctaaaatccttgcggatgaagatgcatcgcagggtttttggtcctgcatattctcctctgataaacacttgtatcaagcagctactaatattttatacaatacatttgacgttgagggtagactggaaggtatcttagcgattctgaatagtaatttgaccgttaacttgaagaatataaacgtgatgctacaaagattaatcaattgtgaattctatgagccttgcccccgtgctgttcgtgttttgatggacgtagtgagtgcatttgtagacccgatttctggtgtgtttgctaatttccaaactttgaagagccaaaataccgaaaaggaatttttaaaattctgggaatcatgttggttattcttggatacgatttataagtttactttgaaatgggcttctaaatatgactattctgaactggaaaatttcaccaaagatactttagatctaagtcgctctttggtggactcctttagagaattttcagatattcttcatgaccaaacgaaaaatttacttctcaacgttttagaaacctttaagaatatgttgtattggctgagattgagcgacgaagtacttttggaatcttgtgttagattaattataagcacgtctgatttagcacatgaaaagcatgtgaaagtggatgattccttggtagaaatgatggccaagtacgcctcgaaggcaaagagattttcaaataagttgacggagcaacaggcgagtgagattctacaaaaggctaaaatattcaataaagcactcacggaagaggtcgctacagaagctgaaaactacagaaaagaaaaggaattatcaagacttgggaaggtgatcgacttaacggattctgtgccggcgtcaccatccctctcgccctctctgtcttcaaccattgctagttcttctgctgaatccagggcagactatttacaaagaaaagctttatcttcttcaataactgggagaccaagagtagctcagcctaaaataacatcttttggtacgttccaatcatcagctaatgctaaactgcatcgtacaaaacctgttaagcctttatccaaaatggaattagctaggatgcaattattaaacaacagagttgttcatccacctagtgcgccagctttccatacaaagagtaggggtttgtctaacaaaaacgacgatagcagtagtgaggagagtgacaacgatatagaaagcgctcgggagctttttgctattgctaaggcaaaaggcaaaggaatacaaactgtcgatattaatggtaaggttgtcaagagacaaactgcggctgaattggctaaacaggagttagaacatatgagaaagagattaaatgttgatatgaaccctctatatgaaatcatattgcaatgggattacaccagaaatagtgaatatcctgatgatgagcctattggtaattattctgacgtaaaggatttcttcaactctcctgctgactaccaaaaagtcatgaagcctttactacttctagaatcttggcaaggtctatgttcttcacgtgatagagaggactataaacctttcagtattattgtaggaaatcgaactgctgtgtcagatttctatgatgtgtatgcctctgtcgctaaacaagtcatacaggattgtggtatttctgaatctgacttaattgtaatggcttatttacccgattttcgaccagacaaaaggttgtccagtgatgatttcaagaaagcacaacatacatgtttagcaaaggtgagaacattgaaaaataccaaaggtggtaatgttgatgtcacattacgaattcatagaaatcattctttcagtaaatttttgacactaagatcagagatatattgtgtgaaggttatgcaaatgacgactattgaaagagagtattcaacactggaagggctggaatactatgacttagttggccaaattctacaggctaaaccatcgcctcccgtaaatgtggatgcggcagaaattgaaacagttaagaaaagctataagctcaatacgtcgcaggctgaggccatcgttaattcggtatctaaagaaggtttttctttaattcagggtccacctggtacgggtaaaacaaagactatactgggtattattggttactttttgtctacaaagaatgcctcatcttcaaatgtcatcaaagtgccactagaaaagaactcatcgaatactgaacaactgttaaaaaagcaaaaaattctaatctgtgcccccagtaatgccgctgtggacgaaatctgcctcagactgaagagtggagtgtatgacaagcaggggcatcaatttaaacctcaattggtccgtgtaggtaggtcagacgttgtaaacgttgcaattaaggaccttactttagaagaacttgtggataaaaggataggtgaaaggaattacgaaatcagaacagatccggaactagaacgtaaatttaataatgctgtgactaaaagaagagaattgagaggaaaattagactctgagagtggtaatccagaaagtccaatgtcaaccgaagatatcagtaaattacaacttaagattagggagctaagtaaaataatcaatgaacttggccgtgatagggacgaaatgcgtgagaagaattccgtaaattataggaatagggatttggatagaaggaatgcacaggcccatatcttggcggttagtgacatcatatgttcgactttatctggttcagcccatgatgtactcgcaacaatgggtattaaatttgatacggtcattatagatgaagcatgtcaatgtaccgaactttcttcaattattcctctcaggtatggagggaagcgttgtattatggttggtgatcctaaccaactaccaccaactgttctttcaggtgcagcaagcaattttaaatacaatcagtcactgttcgttagaatggagaaaaatagctccccatacttgctggatgttcaataccgtatgcatccttccatcagtaaattcccctcttctgaattttatcagggacgactaaaagacggccctggtatggatatcttgaacaaaagaccctggcaccagcttgagccattagctccctacaaattttttgacatcattagtggtaggcaagaacaaaatgcgaagactatgtcttatacaaatatggaggaaatacgtgttgccattgagttagttgactaccttttcagaaaattcgataataaaattgatttcacgggaaaaatcggtataatttcaccttatagagagcaaatgcaaaaaatgcgtaaagagtttgcccgctattttggaggcatgatcaacaaatcaatcgatttcaatacaatcgacggtttccaaggtcaagaaaaagaaatcatcttgatatcgtgtgtccgtgccgatgatacgaaatctagtgtcggttttttaaaggactttcgtcgtatgaatgtggctctgactagagccaagacaagtatttgggttttgggacatcaaaggtctctggctaaaagcaagttatggagagatttgattgaagatgcaaaagatagaagttgtcttgcatatgcttgctcgggtttcctggatcccagaaataatagagctcaaagtattttaagaaagttcaatgtacccgtaccatcagagcaagaagatgattataagctacccatggaatatattacgcaaggccccgatgaggtaaaatccaataaggacacaaagaagagaagagttgtcgatgaaggtgaagaggcagataaagctgtaaagaaaaagaagaaagagaagaagaaggaaaagaaaaagtccaaggcagatgataagaaaaagaataacaagaaggcagaatcgcccagcacctcatctggtacaaagaaaaagtcatccatttttggtggaatgagtgtaccgagtgccgtagttcctaaaacttttcctgatgtggacagcaacaaaaaggcagcagcagttgttggtaaaaagaaaaataacaaacacgtttgtttttcggatgatgttagtttcataccaagaaatgacgaacctgaaattaaagtgaccagaagtttatcctctgtattgaaggaaaagcagttaggtttgaaggagacgagaacaatttctccgcctgaaatcagtaataatgaggatgatgatgacgaagatgattatacgccgtcaatctccgattcttcattaatgaaaagtgaagcaaatggtcgtaacaacagggtggcttctcataaccaaaatttcagcgctagtatatacgacgatccacaagtttcgcaagcaaagcagacgcaggtacctgctgctattacaaaacacagaagttcaaatagtgttttatccggtggttcttcgaggatcctgactgcttccgattacggtgaacccaatcaaaatggacagaatggagcaaataggaccctctctcaacatgtgggtaatgcgaatcaatactcaacggctcctgtgggtacaggcgaactgcatgaaactctgcccgcccatccgcaagacagctatcctgctgaggcagaagatccatatgatttaaacccccatccgcaaccacaatcttcagcattcaaaggacctggtagtgggcccacaggcacacgcaacagttcgagacggaatgcttcatctagcccatttatcccaaaaaaaagaaagcctagatcatgatcttgaagtaaaagtgttaggaattatacctgcatatatattggtgtatacatttatattgaatttaatagcaacattatttttcattatttttcattatttcagcaaaaagaacattttttttcaatttgacgtgaaagagtttgactattacgtgggcatacaatgtttaaatttacattatcctcatggctactctagctatttgcatttcattcaactttttttgatatggcatcatttttattagcgtttactacactttcagaaatgccaatctttggtggcgatttgctagcaaccaagaatgagggagtcgagggctgttttaaatttgaactcgcgttcgaccctttatggcttttgtgtatatcaattggtttagaaggtagtgcgcttgacccatcttgtgcagtggtactttcgctatggagttcttcacaagctttcgaaagtacgtccctttcgtttgatattaaagttgtcgtgagcttttcatcagaagagtcaagaaggttatttaggtactgtattgtagaattgatcatttctgacatttcatttggaggtattttggagttgctgctgctccgaagtttggttattaatttgctttccaaatctcctacttttttttgacaatctagccataattcacgttgcgttagtactgtagaagactcatttttatttctcattagttgctcttgtagatcttcaattttcagttctatgagatccttcatatgaacaaaatttttcatgttgatagtttgtctctcattgtaatcttcatccgcgctggacagccttaaattgaatatcttttctgatagtgatttttcctgtgtcaggggcgactcgaatcctattcttttcattaattgatgcttagattcctctatcttggacaaatgaaaatcaatattacccatttcggaacgtatccgtccagattgcctttttaactcctcttcaatgaatttattgtcctttttgaagtctcttaataaagtttccagccttattatttctgatttagcttgcttatgagataattgtaacagtttgtaattacgtatcatttgatccgcagaagattcagcgttctgtacttcctcgatcattgcatccgaatcatccgtattggatagtattgtattttctgcccccactgactcgatatatttgtttagtgatgtccggtggtgcgatgaaatggtaattatggcgtccttatcgataacatagtccgccggcgcagcatcggtttcttgcttaatatgccacgacttccgctctttccaaagaagctgctctctttcgttcagttctagtagctcttgtttgtctcgaagtaaggacccaatttctcttttcaatagaccatcatgggatactaagagatcattaattctgcatagatcgtttaagcaaatagtgatatccttccggatgcttgtcacctgggaagccgaatttacatcagacaacgctttttcgtgaagcccgaccagagtgcctaagtattgcagaatctgctcctttttttctaaaacctgattcagttccatatttacttcttcactttattttgttaccttatagaacaacgaggttaaaatgtggaacaagaaaacgaaaataatcacttgaactaaaacgtactctatccttcacttttccattccttagccggttctccaatagatatatacagacgttctctgtgttctattatttgtatatgatttacactataaaaagactatctataccttttgttaattgcgcacctaaacgccagagcttacgcccttaaattttttgaacatatgcgctgataccctacaagttgtcctagggctaggatatcgggaaaaaagagacaagggaacttgaaaaaccataattcccaatacataaacctgttacttgatggctaacaagatgtacttttttccagtgacccagtggcttctttaaccactattgtgttcatttctaactctggttaattacataaatattagccttcaaagccgcacacgtttctttttccgaaaaatgaaaaatttttcactgaaaaaaaaaaaaaaaaaaagaagaaatagaaaggtataaatagttgaataatttgcccttccgagatccaacaagatttttgagtgttgggacccttggaggtttactccagtttcgtgggcttgtgcattttcacctagtgtactgggaactttctcttttttactctatttcttttctttcttgcttctatataacttaacttagaaagactttctaaactcgcagaaaagcacgtcatctcatctgtctcacttttattctaaggaaaagaagtcatcgacaggttaacagcagtaaatattatcagtgcaattaataactccgaaagtagtaaaagcaatggccgccgttagagactacaagactgccttggaattcgccaagagcttaccaagactagatggtttgtctgtccaggagttgatggactccaagaccagaggtgggttgacttataacgactttttggttttgccaggtctggttgatttcccatcttctgaagttagcctacaaactaagttgacaaggaatatcactttgaacaccccattcgtttcctctccaatggacaccgtgacagaatcagaaatggccatcttcatggctttgttgggtggtatcggttttattcaccacaactgtaccccagaggaccaagctgacatggtcagaagagtcaagaactatgaaaatgggtttattaacaaccctatagtgatttccccaactactactgtgggtgaagctaagagtatgaaggaaagatttggattttccggtttccccgttacagaagatggtaaaagaaacggaaaattgatgggtatcgtcacttctcgtgatattcagttcgttgaagacaactctttgcttgttcaagatgttatgaccaaaaaccctgtcaccggtgcacaaggtattacattgtctgaaggtaatgaaattttaaagaagattaaaaagggtaagctattgattgttgacgacaatggtaacttagtttctatgctttccagaactgatttaatgaaaaatcagaactatccattggcttctaaatctgccaccaccaagcaactgttatgtggtgctgctatcggtactatcgatgctgataaggaaaggttaagactattagtcgaagcaggtttggatgttgttatcttagattcctctcaaggtaactctattttccaattgaacatgatcaaatggattaaagaaactttcccagatttggaaatcattgctggtaacgttgccaccagagaacaagctgctaacttgattgctgccggtgccgatggtttaagaattggtatgggttcaggctctatttgtatcactcaagaagttatggcctgtggtagaccacaaggtacagccgtctacaacgtgtgtgaatttgctaaccaattcggtattccatgtatggctgatggtggtgttcaaaacattggtcatattaccaaagctttggctcttggttcttctactgttatgatgggtggtatgttagctggtactactgaatctcctggtgaatatttctatcaagatggtaaaagattgaaggcatatcgtggtatgggttccattgacgccatgcaaaagactggtactaaaggtaatgcatctacctcccgttacttttccgaatcagacagtgttttggtcgcacaaggtgtctccggtgctgtcgttgacaaaggttctatcaagaaatttattccatatttgtacaacggtttacaacattcttgtcaagacattggttacaagtccctaactttattaaaggaaaatgtccaaagcggtaaagttagatttgaatttagaaccgcttctgctcaactagaaggtggtgttcataacttacattcttacgaaaagcgtttacataactaattggtaactagggttcattaataataaaataaaactaaaaaatatgtgtttatatttattctgctcgcagttaagtatggaaatcaagaaatagactggaaatgatctatattttcttcgtattttgttagttcatattatctcttgcggatcgtgacagtagcacaagaattcgatgttgcatctcataggaataaaaaagaataaaatgagatttatcacagttgtggctttttctccgctccctttaatattttttcgtagtatttaatcttctcttgttcaacctccgataaagatggtggtaatttttcattaataaggtcttcctttctagccttttcaaaagtgcttagcgtttcattcaaaccttcagtcccacgagctagagcaccacgaggtaagacaccggcattcatagttttcaaatattccactttttcgctctcttctcttagcaccgaaaacattcttgaaactttagcaatagctaatatcttatttctcaaagcctttcttcgggtttcatcttctaatatcgctgatgacgccttttcatcagatggggtgccggtctccttagttgcgtttgctcttgcctttacagtctcctccgcagctttgggttccgattctgggtcaagttcctgctcactacatatgtttaatatagacactaacatgctagtaactttttcgccaacaaaaggtagtgaccaggtgaaaacatccataaaatcaggcaaccagtaagggtgcggagacatgtgaaactgcctgatgttcatgacgttttcttcatattttaacacagcagctttattatgatatgtgtccaggtagtttggcgcactgaacatggttattaagctcgggaagcctgttactttattgtttttatacattctgtacccagcatcctgtgcttcgtgtgctctaataatagataacaaaccatttgccttcaaaaacttgcatgatgctttaaaagtgaaggcgaaagagcaacccctcaaactgttaggtacgaattcatcctcgctctgatcaaattcgctaccatctcttgcatcatcataattttcgacaggatcggcccatagtaggtcacacatgagaccacgagatgggatttctcgaaatctattaattttattaacatcctctactgattttaactctggagagataccaccatgcacacaaaaatattgtccgttcattaaagctgctaatggtaagacattgaatgatctgcagcaagcatcgtaaacttccatatcgtatttgtgcaacatctcattcttaaaagtaaaataagaggtcaagtgcttacactcatggttacctcttagcatccaaaatctccctaaattattcaacttcaaggagtacaaataaatcagacactcaaaagagaatgcacctctatcaacataatcccccaagaataaatagtcgatttcggcggggtcaccgccaacttcaaacagtttcaataaatcataatactgcccgtgaatatcaccacatatagtaattggcgctttgagttttagtagattgggttctttactcaatgctacagttgacatatttaagatttttatggcctgttccttagaaagtcgaccctcatgaaagaaatgctctcttaaaaaggaatgattaggtaatcccgtcttggagtcgaatacttcctcatcacttggtatctttcctgttatggcaggtacagaagcgataggtcggtccttagtagaaattactttaccgttttctaattcgtattttgttaaatcttttttccggtcaacctttatgtaagagtcattaggtttaatgattttgatgcgtgaagaattcaagtctttcgacattggcgttgagagtgttttatggcagctgagctaatacgtcaaaaaaaaaagaatctaaaaaaacttttctttgaataatacctttaataaagcaaatattaaaggctttgcttcgttcttttataataatgcctcttgattcaaaaacattaaaggatttatacatttttcccttttgtttcccagtagtacgttctttttcagaattggaaaattcatgtttcaagaggcgatgacatgaaaaattttgaaatagatatagatgaatatcaaaatgattcaaacagtttgtatttattgcaacaggaagaaaggtggagtccaaagaaatctgcgaaaaatttttatagtgataatccttacggaacaatgagcacacaatatattgatgagacagcatttgttcaggctgagcaaggtaaaaccaatctaatgttctctgacgaaaagcaacaggcacgttttgagctcggtgtttccatggttatttataagtgggatgcgttggatgttgccgtagaaaacagttggggtggtccagactcagctgagaagagagactggattacagggattgtagtagaccttttcaaaaatgaaaaagttgttgacgccgctttaatcgaagaaacgttactttatgcaatgatagatgaatttgaaactaatgttgaagacgactcggctttaccgattgccgtggaggtcatcaacatatataacgactgtttcaatttaaattataataaggtagaaaaattgtatttggaatggcaagaaaagcagagaactaaaaaatcaaaaagagttgtgcatattgagggtgatgatgatgaagacgatgaagatgtagaggactatgatgacgaagatgaagatgaagagatggacgaggttgtacctgacttagtatcgtctaaacctgaaccaattgttgacgaagacggttttgaattggttcaaccaaaaggaagaagaaagcactagtatcttcaaaatctgtatattataattgatagtgcgctgcttttttgcacttccagtaagaaatagcaacaaaattagataaatctcggtggagttatccaaaatatgtaatatatatcaagaaagttacgtattaaacattggacttctagaggagatcttcaatatagatttaaaaggtgggcaatgcatcgctacgtgaagatttttacttttcttcaacatgtgtattttttatgtttcatatttttatattttgtgtttgctaaggtctaatcgttcagctaagttaaagctaagtataagaagcaaaaaatactaaattatactaaattataaattttcgtacataaataatcatgaggtagatgtttaaatatgtaaatagtttcttttttcttctttgtgattgtcaaaatttgtgtctatctatacaaccctctagaggtatatcttaactgtgtattatcatcaaattcgttattattataattgtcattatcgctattaatgaatttaaatttcttgaaaaaagaagatgtcatttccagaaatgaaaaagattcttttctgaagtttgcgatcttaaatagtcggatgtcggttccaacccaaatgttattttcaattatgttgtttacaacgccgggactaatttcttcttcaaacatataactattcaaattatctgtaatgattgacgtgctgacatttggatctctttgactagccttggtgtcatcactgccaccattgctgttatttccaccccatttccatttgaaaaatgaaaatccgccgttactactgttgttgctattaccattagtggaattattgttattagtctcaggagcaacatgatgagaatttggtctagttcttattgaagaactattagaagtagtcttctctaaagtaatggaggacgaagacgaagacgatcttaaatgctgaaagtgattttgcgctgtgttctgaaaaaaataattcatcaagttgccacttccgttactttttgttctatttaatgccattgttggggtacttacacctgagccagcgcttattgttctttctaagcttacagaagattgacctcttgatcttcgtatgtatcccaaacgatctgttgtaggctttgaaatggtattgccttcacattcgtcaatactaatatccaaaagagattcaaattgcctcaattcatgcgaaaaagtttcctcgtatttaaacgacgtctgcgtgaaaatatttgcccatgtggcaatgtggaaccacatcaacagcttatcattagtatgcatagacaaaggctgaaaagttgtcaatcgtcgaacatccagtggtaaccggggatgaattgtggtcaatatatcagatctaagagccgacagtttcgataaagtttcgaaatattgcaccgatttaattctcggaatttcaggaaccttcgacaaaatttgcttaataacccgcaaaagaatttgtaaataaactgtaccggaccaaacttcattaaaattttcatatttgggatttttacatttgtgagtaaacgttagtggtgtaggccattgaggtctatgtggccaatactctaattgatgttgcaaattcagatttgaatctgacttgaaatcaatgaatgcaatgacttggtagttcttatcatgattcgtacttgaaaaatgcttaactgtcccaggtgtttcattttctaatgacgcaggattgaaaagcaaataaggagttggagattcgttttcttgacctgggtcctcattttgattttggcctcgattgtcattttggccttgttgctgattttgatgttgttgatttgctgaagaataaagattgacttgaggcaaatcagttatctcttcaaattgatagaaatccttccattggactttccggttgaatcccatttgcttcaaggtcatgatatgcgaatttaaatttggattcatgtctaaggccttggatatagaatttatagagtcatttatttggtgagtgatggactgatgtctcaccattgcaaatagtagattctccgcatcgtcaaaatataaggtgaaaaatattgtgattgaccttaataataacgccaacaaatccattttgaaacccggtgagatcatatacggtatatcttttgtcttgaagacaggcgtagcgtaagttgtcagataaaccttatttgatgacttagaaagaacgtaaagtagggacattgcagcattgtaggatagtttggacgaggatgtatgactagaggtggctgcacttggtgatgcggacttcttctttgctgataatagaattaaatcgtcatgtgaatcatcatttttgtgagaactggtcaaaatttcgtcattaattggcagcagattgtaaatcaattcataaaaaatcggattcggttgtaaattgaatttaatgttgtctaaaatcaaattcgataattgtatgactgtaaaatctctgaacgtcaaattatttatatcgccgttgatgttggagagtttgtagaaatttggcaaattatttgtataataattaaggttgaaagtctgtagcattttgaagagaacaagtttttttgaagtcaaaatcaggagaagatgattgagtaaaggtaacaagatctgtgaaacgctattttcgttcagttccacaatagaacgctcgttgctcgtatcgttagatgtgccgttgctcgtggtggaagaattcgagcgtgttgttgatgaagacgacgacaacgatgaataatcataatactttaaatagtagatggaaaaaatgatgaatctacttgcaaacttgtctgcaaaataattttggaaacacttattgcaatcaatcaagtttgtcatgagaatagtcataggtatcaacaaaggatgaatctctggtaattgtggctttgtttgcggtttcgtatggtatgccgccgatgatgaactaggcaacgaagcatgcgaagatgaactgttatcgtgagagctcgtcgacacggctctccttctgctggcatcaatatgtttattgtttgtgaagttaaaaatgtttgattcttgttctatggcgagatcgatggggtatttgaaaattttaatgaaactagaaagaattaattttaaatcgtactctcgctgtaattgggtgaggaaaatggtaatgacattgtcttgggccttatatgacatggagagatttaaaacgtgcagacaagactgcacaaattgaaaataaagcgtctgccaattacttgcggtggcgtcggagctgaaaaaattagccttcaagctctggaagtctttattattgttaagtataaaccgcatcgtgcaatttaatagcgaggaagtgaattgaatgcttttgtccttaggcatttgagtacaccagtagacaagaaacatgtttatgtcctgtttaccgccgctcgtgtacaagtccgaagaaaataaagctgccaaaagacgtaaaagaagcagtctattggcaaaaagatgccactgatgatgcatattcagtagtgagcggtacttgttggaattagtcaagatgccgatttcccacaattcgcttgggtgggcggtcacggcagttgtgaaattatcttggaaagccagtttcaagatcgccaacagtagtctttctcccagtgggatgttttgcaagggaagaccctcaatttcatgttgcgtggcccaaaagacatcgtaatggtcctgcgtgctagacttgacccggtcaaaataaataggtatgaggatggaaagggtctttatggcgttgataagccgcgaagaatgaagtcccgtacgggaagcgggcaaggagttcgcggaaagaataatgtagagcgaaaggaagacaatcaagttgttgaagttgggtgggttcaaactagagataatgtgcaggatttttttaaaactagagttaatgctgaagtcctgcacgtccactgatatgaagtccaagtaaaaatcgttgaagacggtatctagcgggacatttggtttgtcgctgaacaacgcttcaacgtcaggcccagaatccagcttaaaaattgacaggtttaaactcaacggatcagcatcaactgaaagggagggcgagggcgacgacgtacgtgaaggggaggacgcatctgcgtcctccggtcgaaccagagcgatgcagtggttcagcaggatcgaactggatttggagtcagtatttcccattatgcatagcctaagggagaatttttatggtttgatttgtgtgtatttctttctctattagctttttctctgatttgtttgcttatctacctgtacgtgtatgttgtgtactcaataaatagaggtctttttttttttttttctccataggtttacccgaaagaaaaaacaccgaaattaagcacgtaaaccggcggaaaagcaaggaaaaaccccctgaagccaaagcaactgcgatagtttttattatttgttatatcctctataaaaaatgtgcgaacaagagaaaagactatataaagaatctataaaagagaaagtaaagtaggaaaaagagagaaaaaaagagagagataaaaaaaattgtgcaagtctgttaaagtcttctcttggatccattaaccattgtttcgtgctccgcggcaggttccgcgacgtcccatttctcgagcgaggacgcctcggtcgacattgttctctggtttatcagcataggtggtagcgagttagcagtgggcaagggcgaccttgtaaattgcggaacaataacgctcgagtaatctctaatgacacccggctgtagtgaagcgtccgaggtgctcggcgtcctcgatgcataaccctggtcgacccgctgtctgattcgcatacccacagtcatcaactggtccttgtggaaatcctgttgctgctgctgctgctgctcctgttgttgttgttgttgttgaagctgtctctttgggacgaggctgcttgcccattccagttgtgcgtccattaagtcttgtttgttcctgtattagtgtgtgatgtaaagcgtgcgtttcttgatctgggttctcttgctgtttctttttctttgttttcttctccaatccttgcctgttgctactagataaataaataccccactggcgggaaaaagaaaaagcacacacacaaacaaacgagaagaaaaaagcgcgtggtacgagccgcgctaatgaggaatagaacccatgcaccacacgcaaatgtgcgcacggacaaattctgccctctgttaacggcaggacctggcgtcccctgccgttagcggcgctagccgacgccgtagtcgcgtgcccttgcccttagcggctgactggctgactcgattgcatatataaattgcggccaccatacgttgagtcttgttgttatatggcggttgttcgtattacagcaaaggatactacaccacaagacaccacagcagcacagaaccacaacaccaatgtccgaagctaccctctcctccaagcaaaccattgaatgggaaaacaaatactccgcccacaactaccaccccttgcccgtcgtttttcacaaggctaagggcgcacatgtgtgggacccggagggtaagctgtacctcgacttcctgagcgcttattctgccgtcaaccagggccattgccatcctcacatcatcaaggctttgacggagcaagcacaaacactaacattgtcctccagagcgttccacaacgatgtttacgcgcaattcgccaagttcgtgaccgaattcttcgggttcgaaaccgttttgcccatgaacaccggtgcagaagccgtggaaactgctttgaagttggccagaagatgggggtacatgaagaagaacatccctcaagataaagccatcattctgggtgccgagggtaacttccacgggagaaccttcggtgctatcagtttgagtaccgactacgaggactccaagttgcatttcgggcctttcgtgcctaacgttgccagtggtcactccgtgcacaagatcagatacggccacgcagaagatttcgtccctatcttggaatctcctgaaggtaagaacgttgccgccatcattctagagccaattcagggtgaagccggtatcgtcgtgccccccgcagactacttcccaaaggtctccgcattatgccgtaagcacaacgtcctattgatcgttgacgaaattcaaaccggtatcggtagaaccggtgagttgctttgctacgaccactacaaggcagaggccaagcctgatattgttttgttaggtaaggctctctcaggtggtgttcttcccgtctcatgtgttctgtcttctcacgacatcatgtcttgctttaccccaggatctcacggttctactttcggcggtaatcctttggcttcccgcgttgccatcgccgccctcgaggtcatccgcgacgagaagctgtgccaaagagccgcccaactgggtagctctttcatcgcccaattgaaagctctccaagccaaatctaacggtataatctctgaggtgcgtggtatgggactgcttaccgccatcgtaatcgacccatccaaggccaatggtaagaccgcttgggacttgtgtctattgatgaaggatcacggcctcttggctaagcccacccacgaccacatcatcagattggctcctcctttggtcatctccgaagaggacttgcaaaccggtgtcgaaaccattgccaagtgtatcgatctgttataatattaatacgcattttttttatgttttctcgtttcttttcttttttttgttttatatcttacacatttttaatatactaaaagtaaaataaaaaaatacgtactgtttccctttgttttctcctcctctttgcttatatctccactgcgccatcgtcatcttcagagggcgtgctgattagagtcactgtgtctcctctgatgaacaccatttcacatcgtctttcggactcactcaactcctcgttgtttaattggtatatggtctctactgcatcactcagcacgatgttgcagtgtgagtcgaacgcttgcagtgtgcccaccagcgtcctggccccgcgcagcttgatgtacaccctctcatcgagattgagtttcaataaatccaaaggtgtctccattttcttgagtgtgcgtgatgttgtgtgtgtgtgtgtatttatctgcgtgtctctcccctgttgtattggttgctagaatggatggaaacatcctgcctcttgtttgttcaaacctcagctttcttgctttttttcttctttcaatatcgcgacctatcacacagcacggatagccaaaagggcgcatcaggaagaagaaaaaatatcatttcagcaaactaaaagaattgccctgaaagctatcgagccctggtaagagagtaccattctatctctgcggctagaaaaaaataccataaaaatataataaaaatgtggaagagatcgttccactcccaaggagggcccctgcgtgccagaacaaagtttaccaaaccaaagccaaaacaaccggtgcttcccaaagacaaaataagaccgcccactcaattgactcatcactccaacaacctgaggattaccgaaccaatcccaccaacaacctcaaacctgcgctgtcccgacgaccacccgctgtggcagttcttctccaacaagaaattcatcaggtccgccgacgacttgccgccttccagccatatcagaccctggagcatcccagagttgaggcacaagtcctttaacgacttgcattccctttggtacaactgcctcagggagcaaaatgtgcttgctcgcgaaaaccatctcttgaaaaacattgttggctccacgcatgacgaattcagtgagctctctaactctatcagaaccaccatgtggcaaataagacatgtacttaacgaaagagagctggcctatagcgcttcacgcgaatttttacaggatgaatcggagaggaaaaagttcttggatactttggccaacgattacttcttgaacaaggatatccctgatgacgaagtcgcctccatgctcacacgattccagttggccattttcggcatatcggaaaccatccaggataatacagtcgacattaacttcatcgacgggatcaagttcttggcaaacttaaaactacagcggttcaaggactccaatgacctcatatccgaaatatcacaagaaccgatcacagacgtgggcgagtcgttcatcttattcacttccgacttcgaacctcatgccgttcaagaggcttgtgtcgccatcaaagacctgagaaagtccccagataataaagtccctaaattagacgaactccccaccgtgagaaaatacttgaaacagctaattcatgcaagctccgtggagcaagcaactgcatgattcccgtgggcttcctaccctctctcctgtaaatatatatatatatatatatccacacacactcgcacatacatacacacatacatacacctttatatagctatacgctgtatgtattcagaaattagtcacgttgtggaaaatctccctagcaatgccgcctaccttactcttattgtcgttctgtccgtccagtgcgtacttgtctttcaccaggtcacgggcgcttagctccaattctagtgtgctccattgcgatgtaacaatttcgacttcctcaagggggcaaacctccagtaagcggcccaagatgctcatctgcagaacaattatctctgtgggaatttcattatccacccaatttggatcgacaaacttccccatttgataaaatgttaaccaatgctcatcgcccaacgccttcatcatatgttggcccgcttcttgacaaatttcaaacacttgcttgcccaattcgtatgctgtgccaaaatctaaattcaccaaggcatagtcaatatgtaataccatcaaatccacttccactttacccgtttggccctctctattaatggataagctgtcgtaaatcccgaataacaagctttttgtagttggcagatccttatacaatcgcgggttcagctctaataagttggatattatatcgagggggcaatctctatattctagaatgttgcttggtttgaaagcggtatctcttgcgccattgtgcgacttatttaggtttatggaataatgcgacaatttgtctgatatctcaagcaatacttccagcttagttagatttgtgcctgcccgttgcgacatatgcttctgaattatttgtaacgtttgcgaagcttttttcatttcaggctctttacgtaatccattagaagcattattgaagaaatgccagaagaacttcaccagaagttcatatatttgggtattgttactgtagtcgaatctttctatgatggcttcaatgtacgcgaactcattcatttgtaagaggatttccaatatactgtatagcttttcatccatactaattcgggtgaaaattttatcatccttgctgatgtccaagaccgtttcatacatggcttgcaaaaaactggagatttcgttggctttgttaaattcttcatggcatagtgaagagaaatgggccaactgagccgattcttcttcctgtgttatggcaaagatttctttaaatgaaaatttcgtggaacatttgatgaagaattccataaattgtttcatctctagagcagtaatagttttctgttcttctattgtaatttcatcagggaatccactcaagatactccataattcatcaagcttatgagttaaactggataaattaaataaattctcactgttgtgaaataatatatcaaccacattactttgcaattttctggacgcttcactgttatcttttactcctttttcgagactgtaatagagctttataaataactggtaattagtatcagattttagtgagaactgctgtttattgaagaattccgtaatgaacgtttcccatttcttcccataagacaaagtgggagctaattcatcttcaataacatctgctataccaatatatccttgcatatcctctacaccgtcaaatattatcttaaataactcgctatcaggcattttttcccattcgttgattttaaatatgagatgaagccgtttatttaggtggtcgaggggttttaatactccttctacccatcctataaattttgtagataacacttttgacttggcagtctcccatagtacagaatataataaaggtgtttcaggtatcatttcattacatattaaaatcctttctctcaaccactcctcaaaattctccaaggtcttgttattgagttttttgcttatgaattcttgcagttcatgatatctgttcgatctcgttgtggtatcactttcaattaatggaatcaaactgctgtcactttctaatagttctactattacatcttcgtcggttgtttcttccccttccggactttgcacctcctcttctaattcacgaagaaacaaaaggttttttgggtcatctaattctggccacaaaacacagagaatctccaagtacttggattgtgagcccagtctagtagacaactttttgatattgcgcgtgtcagccctagatgcaaaaatgcaagctaacaaatatagttgctcttccaacatttttactgcaattttcttggcaacctatcaatactctctgatataaccagttattgtctatttacaattggtttttcttttccctagtttttctttttctctgcaccttgcctcttcctcacaatttcaataaattacagtatatttacgaaagagtaacaaaaatttcaacaggtcacacagagcagaaatacctatttgaaacgaaaggaagatcgttcatgttgctatatatgttcttaaaaatgatttaaaattatacaaatattgtatacagtagtatagttatagaattatctttttgacgaggttaatgacatcatagaatagagagttattaaagagactaaaaaaattaaaatcgaaaaagaaagatttaaaaaataagatatgcatcactcctttttcctgttcctttcctttctattttattattggttcctttacacagtttccaagacttcgtccttgaaaccggtaaccttcttacccttttcttcaccagaaccttcaccgtgcaaagccatcaaagcaccgacatcgaactttggttgtttcaacaacttaacctttctaacatggatgttttgtagtgggaaaatgtccttggtggcgttttcaatttccttgttgataacttctggaatcaacttggaggtcaattgggccaaggtagatccttgaacttccttagtcaagatttcggaaataacctttctgatagctctgatatgggaagattgagcgtaagagtgtctcttaacttggttagcttgctttctggtgaaggcgatagcaaagattctcaaaacgtaatcatcagaagtcttaacagtaacgttagcttcgatcaaagtttgccactttctaaccatggatctcaatttatcagtagtgaagtccataccgtggaagttggtcaataaattcttaccttggacttcgtcaactcttaatttgatttttctgaaagagtggtcttcagaaccctgtaagtcagccaagcaaacttcgacaactctacctttcaaagcatctgaagcactcttcaaaccagtggacttgttaactaaagtcttaccaacatttctgttttcaaaagtggatggagctttaatgtcgaaccattcctttctggtaaatgggtcaacgactctcttcttttgacctttcttacccttggatagtctcttattctttccgacagccatgattaaacgattggttattcgtgtgcttgttttgtttccttaatattaaagttcacaacgtgaacaccttcctttcttaatagaatagttgtgacatctagtcattttgggtatattatcgcgcaggtgagagagtcctggaatttccagcggatggtgacgcgaggcatccgtagtgcacaataaaaagttagtttttcattaaccgaaaaaaaaaaaaaaataaaatatattaatgtttgggtttcaacgtttccgtgggtctgggtccacaacagaaaactgtcctgaagtttgattaggttttagtaagtaaacagttatggttacattattaaggaatacagaagagactgcatgtgtacataggcatatctatggcggaagtgaaaatgaatgttggtggtcaaatgcagtccatatttttgaattcttcatccatcgaaaaggcgtaatttatttctaaaggaagttttagttctaccataatgcttgcactgggctcctcgagcaccacaacaactaatttttctcccactaaatcattcactacacttatccaagaaaattgctttagtttctctatagttattgcgggctcccaggcaccgcatatgaccttcttaatttcttttgacgccttgtaccctgggttgtcccgcaacatcttcaccatcttaatcaggacggtctccagagcaagcgtatgacgattcgtgccttcggtttcttgcgccagggtatataaaaatgttctcatcaacagagacattcctataatcttctttgaaatagtttcatccttgaatccgttaatagcttctgagaaatagcgtggtaccatctcctgtgacactaccaatttacccttttgtagaccacctttccgtacgaagtcttttttagaaatttctacggcagcttcacatattttgaatgctttttcagtactaccacttacgttggctacgttctttgcaataagttgagtgattttgttgttgatcttatgattgattactatcacattatctggtattttctggttctgtccttcgcgaatattattgtaaatagtcatttccttcttatcatttactttgacatgaaaaggtttcaataaagatttgagtcgcgtgatgatcatttgttgcaattcattcttgtccaccttattaagtttgatttcggtaaagtgtgctttgagggagggcattatatttatttgctctctaatcgtcacattatgtccgccaacgcaaatgatagacaattttgaatttttcgaagaaatccatttctcgaaatattgtaaaatcttctcactcaatagattttccggattttgtattaatattagtgtctttctcttttttgctttcgggacatttgtaatatagaagtttaaggcctctagtgatatatcaccgcatagattttctttagaaatggcgaaccatattttctcatataatgcatccattcctgccagttccaaggcatcaatatgaatgtaatcgaaaataggtagttcctttcgggccgaagaggtgatcaactcatccattacatcattcacaagctggaatttagtagaatcatctgcattggtaatataaaatagtttattttgggaagacatcaaactgtcgtaaatcggaaggaatattcttgtaaaatcctccacttgtgattttagtagttctctcttttgtaaagattctctaattgattcctctaaatttatatcagcgttaaaatttgacagaatggtttctcttccagatgaagagcatgcttttctaaacttatcctcaaggcctgcaacgtccaagcttgactgttcgtctgttaatttgttcaattgggaggaatctgttacttgattatctggtgcaaaccggtctaaaattatctgatatttttttttcaactttgacaaagtagcgaaatcaatcatctttgcattacctttttctggtgtaggattttcgttcatactatgaattttggtgttgcccctgggaattccaggttttccatttccgttcatttcgttatctgtttctgtagtgtaatttttagaaaattcttgtgtttcttgaatgtggatttttctaattttactgctcaattcgcttccgtgagcgccacgtcttttatttactggtattattgcttcatcagaactttctgaactaacttcatctgtttcctcttcaagcccaccatcatcactcacttctggattatttgcatatacaaaattctctcggccgtcaacgagttctgtagatgtcttctctggctttgacccaggtttacttgaaagcacagatgtttcattgtttggctcataatcggattcctgttctgaagagtttattggtatttcctctgaaacaattagttcctttgatatagatcttttttgtaaaattttcgaagaatctgtaggtgatgtgagcgcagaaggggacgccgatgagatgttaggggaaacagactcttcttggggagaaattgaaccatgagttgttgacgttcctcgctgagacggtatatttccattatttacgtcatcatctgcagagggctcgattttaatttttttcattgaaggtttctttgctagtctttttgaagatctttcaactcccatcttatgcatcacctgtctatttgtcttctgcccactcactggtacagatactcttttcaagtattcatcagattgtttgggttccatttcctttactcttcttatgatttgaaaaatatcaattggtacaaacttttccgcagtaggttcgcatgcataacgtactagaaaatctctatcctctattttatcgatactactatcattccattgtgactctggcagtatctgtccaactgcaatgaaatccttaagccaaatctctgatagctcagcagttaaatataactcgctcttatttacttcgttgaaaaatttatctttgtaaaattctaaaggatgatcttcctttattagatctggcctgaattgttcgtagtacagttttggtttgagttcaaaccatctcaagtaagaaaaaacccaaatctccacaacattattaagtgtattgagtctgatctcatggatcaagtagacagaatatgtttccgtcacattatcattaaatatcacgctctcacccttcccaaaactcaatccatcagaaattcttttcagaaatacgttttctcctcctctttttcttgatcttcttctattgttgtcgtcaataaccctcccctgatcatctgtaatgataacttgccaaccgtccaaatctttcaatgttttagccattttagctaatccaattgttagaacaaaacaactttcttaaacccctgtaaggaaggtgatgaaagggctgcttatgtgtttttctttttcatactatgttcattttaacttttttggaaagaatagcgttttcgcggtcatattactgatgcgatgaaaatttacaattatttctttatttagattgatacataatatggttaactttaaatacatcttttggacgccgcataaacaaacgtcccgaatactttgttcccctggattcgttgtttgcttaacactgtcaactctctacttagtttcatttacaccatttctttgtgtatcagtcattgcgaatacccttgcatatctaatggatcgaaaataaatggtgatgtcaagaatacgagatacaatagccaggccattccagaaccttacagcccttgagaaagtggtacagtggctaagattagggacgacattactcataatctctttcgggttggcgttgactgtcggacccctttcttcgccaagaacattgtacatgtcacgactggatacttactctgctgatattacgacgggtttatttaccgtgttgagagagtctatggagcagtcgacatctacagaagaaaataacggtgtaggcttaacaacatccgaactgtatatattgactgcttacaccgaaagtcagataaagaatgttcctcagtacatcacagtgtcgctttatgggaggtgcgattcaacatataccatggtggaagtattcgactctgaaggaaatatgcatagcgtaaagaattcgactactaagagtacctgcagtagcataggaacggactatctttttgattatcgtgaggttttagaaagcttgggtttagatatcattttagattatgcatacaacaaaatcggttcacaacaggcagaaagttctgcatacacgacctacatgaggagtttaaaacataaaaaggccaacgtgttacatttactctatgcagttattagtttccaggtgtgtatgttatttttcatgatatggtactactacataaagggaaggtttatgaacgccctcaaagaaagggcacttgttcatatcaactctctactatcgctagttgttttcattgggggcctgataagtagcataagccttgcctgggttaactacactattcagtctagaattaatacagaattagaggccttcgggttttcttaccatcttggagttacatggtttgcgcttctgtggtgttttgcaggtttgatttctgtgtcatgcttagcttggtctggcttagaatggtgtatttccgataatggcacgtcctatggaggtggaatcgatgataaattcttaggctaccaagccggtgtatttactgatgcagatctagacgatgaaacttcttacagtcaacgttatccgcaacgacagtctacttcgggcgaggctgaactgatgagaaacagtgatactatggcaacaataagaaaaacatctgatgttgacttaaatagtgaaaatgatgctaacaccagtttagaccatggaaatcccaccgcaaatataagcaatggcggcaaacacgaaccatttgctactagagaggaattcgaattgcaggacataagattccggtcaagcaacgacagtgaagaaagtatgcaaagggttatcaagccttcgtcagcattacagttttgaattctttcacccatcattcaaaatgcatatgcatactatatttgtctagtttttaattatataataataataacagaaacaaaaaatcgcattcatcgtttaatcttatttttcttttttcacctttttcttgtgaaattgccaagcgcttaaaaaatcgttatttcagaactaaacatcattaagcaacgaagaagagaaaagcggaactataaccatgagtgatactacggaagtccctaggcaatcatctgagaacgaccaggataataacttggaaagaaccaactcattaaaaagtccggacgtgaccaacaatataccaagtcttttcaaattagccgccgaatggcaaatcaacaatccacaggaaaccttccaaaaccatatcctggaaaatgatgtactcaagaaaattaatgaaatcactcatttgatccgggaatcgtacaaagacctctccagtcaagatgggatgatgtccaaacaacaacaggaaaagatggattgggatttgttttgtactgttcctgtaaacattattgagcaatatacaaaagacatggacgaaatatatgaaaaaatggaaaggctagcaaaagtaagtataggtcgaaactaggcatcctgtgccatctcaattttactacgttcttttactaataatgcaaatttaataacagcaacaacgtctttggtgtgaatccgcttttcaaatagacgtggaaagatgtggtgactccattctcaatgctgaaacgtggatgaagaagaaagagcgccatttagagtacaaaaatattgaaatggaaagatccgcaaatgaaattaaggaaactattcaaagactaacagatgatagatgagccatactcaaatatatctgcgatattgctaatgttagctatttctcacatttgctttttttgattttatttatttacttttacgacaactggccttatcactcggctctctaaaagaagtcatgttcccttcgttgggttaattttttttttttttttttttgtttatatgttttttttttttttgccaggtattgttagcgccagatagcaaaaaattttattcagggatactgaacaccggggaagttaactgagtatatcggttatcattataaacacaagaatgtaagccagaaagaaaaataaacgtccacccctcgaactttcacatataagcaagtaaagaaaaagttaacaaaaggaggttcagaacatgacaattgaaagcactctagctcgggaattagaaagcttgattttacccgctgattccatagtgaatgtagttgaccaattccaagaggagttgttatcacggcttcagacaaatacgatttctatgctcccgcagtgtttagtcccagataaacgatcgcgatggaaccctgaagacaaaattctgaccattgatttcggcgggacaagactgaaatttgcaattatctctctgccccaaatcgttatcgaatacaatgatgccttcgaacttacctacaacatcgttgattcgaatttctttaatcaaatcatctatacaatatgtaccaggctggctgcaaatggttatataaaaaaaaagaacgagtcatctgaggcgtctaaattttttgtttccgtgacattcagttttcctctaaatccagaaggggaggtagttgcaatgggaaaaggatttgtgatgactgacacccttcaaggatccacggtgaaacagctcatccaatcttcctttcaccggattatatcagaaaatatcgaagaatttttctgtaccatgaacgtgtgtcatgtaataaacgatgcaattgcagtttcactaacaagcaaatttatatgcgaaaacgattccatctcattaataataggaactggtacaaatgcatgttttgaggttccatacggatatttaccacctttcaagagagatgccctgagagaaacattaccgtcaagctataataaggagacattaaatttcaaacatgttctcattaattctgaaattggctttattggtaaaaatgtcattgcattgcaaccgtttgacattcatggagcaatctcatacgaaatgccactagagtgcgttacttctggtaaatggcttcccctatcattaaaaaatattctattgcaatataacataatccccaaaaacttcccagtagagttcaatggggaactggtatgccagctggcagaagactgtactaatgcttggttcgaaaacgaacattatgcactaatttgtcagatcgcacgactattaatcaagagagccgcattttatgttgctgcaattgtacaagctattgatatcatcacaggctgcaaaaactataactttattcatattggctacgttggatcctttctccacaattcaaatttttatcgagagcagataaaatattactccagcatacatattaagttgcaattcttaaatcacagtaatcttctaggcgctgcaatagccacctacttgaacaaatcagacaaccaagttcaataatatatttcatcatttcttaccatcttctcgatctatttttattattcccagaaaactttgtgatgttggtgtagaggaaatgatccggcgcactaacaccacacgcttgtaacaaactaaggatgtcctgaccttttttgattatgttaccaccccatttttgcattcttctttttttttttttttttgggtctgaaaatttttttgcttctacttaattataattttatataatcatatatggatctgattcttaaaaaaaaatgaaaaaaagacaaaacaaaccatataggtaacaatttctcttagtgacataaaagaagaaggaacgataactttttcaataaacggaaatataattgttgattctttctctttggttttgtgcgatacattctgcaatccaggtaatattcctaacttcttgttccttggatttcatccaggcccaaacagtgctgatggcaaattgttgcgtgaaagcatctctacatagttccatttccaattggtaaaagtgatcttctaagttaccagtctccaaaaatcccctatactcatagacgttagctaaagcagctctaactccttcgaaatcttgggcttgcgccaagtgaaacgttgcaagagggtacaacttacctatgttaggtaacaagtcacttttcaaatctgggtcaatatctgaactttgcaaagagttgagtgcaatattgatacttcttctgtcagcttcaaaccctagtaatgtttgcatacattctttagcaggttccggaatttcttcagtgacaaaattgtaaaagtcttctaaataagccttgtacagcttatttctaataatttcaatgttcatatcgtctagctcctctgccgtgtcaaaacagtttttgaagtaaggtgccagtggggtatccaccaatacggtttcgtatagggattcaagatcagtagcaacactcaacgtaggcaaagtatcaaaccaacctagcggatgacaacgttgtaaaatttcacccttatcacgatcatgaatagtacctgtaatcatcaatgctacattgtcgatcatgtaaccataagtgatatagtccatgaactttctcgtggatccactggattggtctcttatgtagttgaattcgtggtacaacttgctagaagcatattcttgaatcaatgacgtggtcaaagactctgaggaaacagaggaaagaaaattaccataatcagttgatgataattgtaattttagatcttccaacgtgtcacattgtgttaagttgatgtattggttattagataacaacccatttctgtagcctctcactacaccttcaataaacccattgtcaatattgaaatacacgccttccatcttcgcaagactttagcaacacgatccgaatggtatactcttttgctagctcttagcgttctttatgccataccttaaagggttaagaggtcaattgttcttttgtttttgcagtatatcgaagatattttaaaaatacgtcactttgtacgcagatatcagcgtaacaataggtgcgcggaaattacttagttccataatacaagaatctgctgactttgcgtctgtaagataagaagggtacggcccagagtatgaatcgttgggggatgaaatcactttttcatcttcctacaattcattttgtccttgaaatacataataacaaaatattaatgaaacttgcatgttaccaaataacttgaacttcagcacttctatttgtataccagtatcacagcattcagcaaatttgattatctctcatgcttcatgtcctaccttttttccttctttcttccttgtcttaatctgaaagttactaataataataaagacaaaatatcacccatgcaccaaaatgtatgggtcataattttttttcttgccttcaaaaatcgttgttagctgcaaaatggcggtgaaacacatagttgtggttatgcgtcccctccgggcggccgcagatggaggatgcccccatgtgctgattctccccgtaggcggcgagtaatatcctcgcctaacctggacttgccgtgctaagtcggccttctagctgcgcttccgttcagcatcgtttacggtagagggagcacatgggcggaaacaaacctcattctggtcctgtgcttgcccatttgcactgtatagagtgtgtgagtttcaattaatgttgtaggcgcgaggccctgtaatatggcagttgatcaaaagtcaatagataattttcaagcaaaatctcatttaggtttgactactttcttgaacttggaagagaagcaaatatattcaacgaaatgactgcccaacaagtatgtgtaaagatgagtaaattgaaggatgtgatggttatggagatggcacacgtgcctagaggaaaatagttacccaagaacaaaagcaggaagggagctaaccttttaaatatgaactggacaaaactggacaaaatgaaaataacgattttagtaaaaatgaaaatatagcatcaaatgactgagaaacatagtaacaataactcatattatagctaatctgagtaaacttcttcctacgctaagaatttttttgaggatagtaccaaaccttgtgctgaatcagcacacgccatgcccaccatcaattgtgcaagaaaaaagtaaacgagtagtatactaactatatatgtgatttacatcacgatatgtcaattataggccccaaagtggtatccttccgaagacgttgctgccccaaagaaaaccagaaaggctgttcgcccacaaaagttgcgtgcctctctagttccaggcactgttttgatcttgctagctggccgtttcagaggtaagagagttgtctacttgaaacatctagaagacaacactctattggtcactggtccattcaaggtcaatggtgttccattgagaagagtcaacgctcgttatgtcattgctacctctaccaaagtctccgtggaaggtgtcaacgttgaaaaattcaacgttgaatactttgccaaggaaaaattgaccaagaaggaaaagaaggaagctaacttgttcccagaacaacaaactaaggaaatcaagactgaacgtgttgaagatcaaaaggttgttgacaaggctttgttggctgaaatcaagaagaccccattgttgaagcaatatttgtccgcttctttctctttgaagaacggtgacaagccacacctattgaaattctaaattgaactgaaaaaattataaatgatttaaaatagaatttcaaaacaaggagaattgatagagaatgcgttgatctgaaaatactgtttgacaataacggaaaggtaagtggatatgtaatctaagtttaatcctcttctaattcatttttcctatcaacattatctgtgcttttctatatccttctttttgtatctataattttttttttctcttacatagcaaaatacaaaaaatcataaatattaatatctaagggttcaagatcaggtcatcgccgttctgggccactaggctatatctattcatttacattggaagctgcatggtctactccaaccgcactgaggcaaagtctctgtggaggaaatgctgtcctagcgagccattgcaataggtataatcagagtcgtcctcccaatgtgttaacttctctcaaaaccaccatataaattctgtaacctgccagcgataatgttatatatgtaaaaggtaaacatacaacccaatttgtccatactaagtggatgctggggaagcaactacagtgcagatgctaaagtttgctgcggcaaataatctcaacatttttgtgattaaacctgcctcagtggggtgtatgattagtgcgttgatatttaatacacgcgtaaaagttaagtctgttgtacgttttatttcgagtgacgaaagaactacgaataacttcctgcatactgttgcctttttctgtatttacgtatacttttatatcaaatagcttggccaaaagaaagtagcattgtgtatcaagtcataattctaattcttagtttaacttcagcaaaaataatattcttcgtcagacattctcatacaatcattaacccatatgaacgttaaatttctcaatttcttgccttcgatgccctatgtatatttttatctcaaacccgaggcagtgaaaattttagctggtgcatcgaaaagagaagggcattgaaaattttacagtgttaaaagaagtgcttttcatgttagaatgataagaaaaaagaaaaagacaacaaaatatacgtctctaccatgtctgatatgcttccattggctacgtatagcctgaatgttgaaccatactccccaaccccagctctgaacttcaaaattccggttaccattagaatcacaatggcggccatcgaccctgagccctttgacgatgacaaaaagccatctactttaagaataatcaaaaggaatcctgaactcactcgcggtgagtactacaaccaagataacaatgacggcctcgaagaggatgaaagtgaaagtgaacaagaagcagatgtaccaaaaaggagtgtcaaatcaaaaaaaggtaaggcagtcgagcaaagtgaatcagaagactctgaagatgaaaacgaaatcgacgatgaattcgaagaatgcgttcttttaaccttatctccaaaaggccaatatcaacaagctttggatattaccattgcaccagaggaagacgttcaattcgtcgttaccggttcatacactatctctctaaccggtaactacgtcaaacatccattcgacaattcttcagattcagacgaagatgaagaagactattacagtgacgaagaatcttccaatggagaagaagaagaagaagaagaagaagaggacgatgaggaactaagttccggtgatgacgatcttgatgatttagtagatgctagtgacatcgaaagtcgtcttgatgaattagtcaaaaaggacgaaaagaagaaaaacaacaagaaggacagtaaaaggaaacatgaggaagatgaggaagaaagtgctaaacctgccgagaaaaaacaaacgaccaagaaagacaagaaagcagagaaagttaaagactcggaagagagcaaaccaaagccaaagacgaagctactggaaggcggtattatcattgaagaccgcgtcacaggaaaaggcccacatgccaaaaagggtaccagagttggaatgagatatgttggtaagttgaagaacgggaaagtttttgacaagaatacaaagggtaagccttttgtttttaagttgggccaaggcgaagtaattaaaggatgggacatcggtgttgctggtatggcggtcggtggtgagcgtagaattgtcattcctgctccatatgcctacggtaaacaagctttgcccggtattcctgctaactctgaattgacatttgatgttaaattggtctccatgaaatagggtccttaatgcatacgtattgatatatgtatctataatactatatacaattatctatacttccattactaatattatctttcaattttacatgtttttttctgccataaaaaagcaatatttttttgcgagctatttagtgatatagccgcccagctacttgtcgatgcatatattggctgagagtactaatacaattatcggaagacctcaaagtaaaatatagaagctttgagtaaaaggagctcgagttttaaaaatgacttcgtaatatgtaaagtttatgtcatatatacttacacgataaatagaccattgatcgttagagacgagcgcattgttttgttgaatccctttcaacagcgcgacaaaagttaatcgagaacaataagatgttgcattcaagggttagtcaaacatatcagaaggccgttttctaaatcacctcaagaacctaccacacagatacatcttgaagaggtggagtaccaaagggaatattttgtacgagcaagttatagtaaggacacttcagtgagaaattaatctgacttacttttacttaattgtgttctttccaaattagttcaacaaggttcccacatacaacctcaaatgtcacttcccttaaaaacgatagtacatttggtaaagccctttgcttgcactgctaggtttagtgcgagatacccaatccacgtcattgttgttgctgttttattgagtgccgctgcttatctatccgtgacacaatcttaccttaacgaatggaagctggactctaatcagtattctacatacttaagcataaagccggatgagttgtttgaaaaatgcacacactactataggtctcctgtgtctgatacatggaagttactcagctctaaagaagccgccgatatttataccccttttcattattatttgtctaccataagttttcaaagtaaggacaattcaacgactttgccttcccttgatgacgttatttacagtgttgaccataccaggtacttattaagtgaagagccaaagataccaactgaactagtgtctgaaaacggaacgaaatggagattgagaaacaacagcaattttattttggacctgcataatatttaccgaaatatggtgaagcaattttctaacaaaacgagcgaatttgatcagttcgatttgtttatcatcctagctgcttaccttactcttttttatactctctgttgcctgtttaatgacatgaggaaaatcggatcaaagttttggttaagcttttctgctctttcaaactctgcatgcgcattatatttatcgctgtacacaactcacagtttattgaagaaaccggcttccttattaagtttggtcattggactaccatttatcgtagtaattattggctttaagcataaagttcgacttgcggcattctcgctacaaaaattccacagaattagtattgacaagaaaataacggtaagcaacattatttatgaggctatgtttcaagaaggtgcctacttaatccgcgactacttattttatattagctccttcattggatgtgctatttatgctagacatcttcccggattggtcaatttctgtattttgtctacatttatgctagttttcgacttgcttttgtctgctactttttattctgccattttatcaatgaagctggaaattaacatcattcacagatcaaccgtcatcagacagactttggaagaggacggagttgtcccaactacagcagatattatatataaggatgaaactgcctcagaaccacattttttgagatctaacgtggctatcattctgggaaaagcatcagttattggtcttttgcttctgatcaacctttatgttttcacagataagttaaatgctacaatactaaacacggtatattttgactctacaatttactcgttaccaaattttatcaattataaagatattggcaatctcagcaatcaagtgatcatttccgtgttgccaaagcaatattatactccgctgaaaaaataccatcagatcgaagattctgttctacttatcattgattccgttagcaatgctattcgggaccaatttatcagcaagttacttttttttgcatttgcagttagtatttccatcaatgtctacttactgaatgctgcaaaaattcacacaggatacatgaacttccaaccacaatcaaataagatcgatgatcttgttgttcagcaaaaatcggcaacgattgagttttcagaaactcgaagtatgcctgcttcttctggcctagaaactccagtgaccgcgaaagatataattatctctgaagaaatccagaataacgaatgcgtctatgctttgagttcccaggacgagcctatccgtcctttatcgaatttagtggaacttatggagaaagaacaattaaagaacatgaataatactgaggtttcgaatcttgtcgtcaacggtaaactgccattatattccttagagaaaaaattagaggacacaactcgtgcggttttagttaggagaaaggcactttcaactttggctgaatcgccaattttagtttccgaaaaattgcccttcagaaattatgattatgatcgcgtttttggagcttgctgtgaaaatgtcatcggctatatgccaataccagttggtgtaattggtccattaattattgatggaacatcttatcacataccaatggcaaccacggaaggttgtttagtggcttcagctatgcgtggttgcaaagccatcaatgctggtggtggtgcaacaactgttttaaccaaagatggtatgactagaggcccagtcgttcgtttccctactttaataagatctggtgcctgcaagatatggttagactcggaagagggacaaaattcaattaaaaaagcttttaattctacatcaaggtttgcacgtttgcaacatattcaaacctgtctagcaggcgatttgctttttatgagatttcggacaactaccggtgacgcaatgggtatgaacatgatatcgaaaggtgtcgaatactctttgaaacaaatggtagaagaatatggttgggaagatatggaagttgtctccgtatctggtaactattgtactgataagaaacctgccgcaatcaattggattgaaggtcgtggtaaaagtgtcgtagctgaagctactattcctggtgatgtcgtaaaaagtgttttaaagagcgatgtttccgctttagttgaattaaatatatccaagaacttggttggatccgcaatggctggatctgttggtggtttcaacgcgcacgcagctaatttggtcactgcacttttcttggcattaggccaagatcctgcgcagaacgtcgaaagttccaactgtataactttgatgaaggaagttgatggtgatttaaggatctctgtttccatgccatctattgaagttggtacgattggcgggggtactgttctggagcctcagggcgccatgcttgatcttctcggcgttcgtggtcctcaccccactgaacctggagcaaatgctaggcaattagctagaataatcgcgtgtgctgtcttggctggtgaactgtctctgtgctccgcacttgctgccggtcacctggtacaaagccatatgactcacaaccgtaaaacaaacaaagccaatgaactgccacaaccaagtaacaaagggcccccctgtaaaacctcagcattattataactcttgtagtttacatggtgatactttatatctttgtattgtctagctattctaaatcatctgcatgtaataagaagttgatcaaaatgactcgctgcgtaaaacctctcttcgatcggaggtgccgcctaatttatcgcctagcactgcgctttttcaaagtttttcagagcaaaaaatgaaaagtaatgagcacaacaatagaagagtatcatgatatataaggtcataaaactaggtttcaggggctatcggcaatttgaggaaccttcaacctgcctcaagtaaaaatcgcttcgtaacattaatacaaattctttttgcaattatggaaggaagatcagattttgtggcgacttcacagtccggaagtgaaatgagccatagtgaaactaggaatagaactgggatgaatgctaggaaaaggaaattcgcctgtgtggaatgtcgtcagcagaagtcgaaatgtgatgctcacgaaagagcaccggagccatgcactaagtgtgctaaaaagaatgtcccatgcattttaaaacgagatttcagaagaacttataaaagagcaaggaacgaagccattgaaaaaagattcaaggaactcaccagaactttgacaaatttaacttcggatgaaattttgaagaaaattgaagaggaacaggaaattgttttggataacagtaatttcacaaaagaaaaagtaaaacaactcaggaagagtgcttttgagacgacagaaatagaaccgagatcatacaaaacacttcgaggagaacctatttcttacagtaccaacagaagacatacggattcttctcctttaacgctcttaagctcgtcgacaaacttcgaccctgttcactcaacaaacgttatgacagatgatcaacttaagtgcttgccaaaaagcctgggcgacgtatatttgtcaagcagcgatattgctgagctgtttcaagaatttgcgacaaaatatcatcaatttttacccgtcgttgacctttcgaaaggagcagagcgaatttatcacttatctccttgcttattctgggtcatcctgctcattggtttaaggcggaaatttggggctacagacttaatgactcgattatcagtgctagtaaagtcagttttatcagaaatcacaatatctccaataattcgatatactccatcagataaggacgaacccgttctaaatgtagcatctgtatattccgtgcaagcatttcttttatacacgttctggcctcccttaacctcttcattaagcgccgacacttcgtggaataccataggaacagcgatgttccaagcgcttcgggtaggactaaattgtgcaggtttttcaaaagagtatgcttcggcaaattcagaattagttaacgagcaaatacgaacttggatttgctgcaatgttgtatctcaaacagttgcatcatcatttggtttcccagcttatgtttcatttgattatttagtaatcagctctattagagtaccaaattcaaaaagccaagtagatatacccaatgaactaagacaaatggctcaaattgctagatttgagaaccaaatcgtaaacacaatgaactccaccccggcgagtgttactgggatggtaagtcaggaagagaagcagcccttgttacacgttcttaatcaacaactaagtcaattggagattagtcttgaagaaaataacctagatgatatccgaaaatttttattactagtggccaaggttcacttattaacctattacttcactgatgttacctcccaaagtgctggaaaatcaaatggtaatatttatgagggatcatattccattatggaactcgatacaagttttgaaacgaaacgtggattggtgaaagtttataatgccgccgtaaactttcttatacatgccaatagtatgtgggaacatgatcctaccattattaagtactttcctggtttgtttgtcttgaatatatggcaatctgcctgtattattagtaaactcatacattcatcacttcattcaatgctagatgttaactcaggcaaaaaagcttataacaacgcaatttcattgacgtttaatgcctcagttttaaaatatgatatggcgtacagatcatccggaataatgcgaagcatatggagtttatttgctaatatgtatgatgcctggaaaaacgaccaaaaggaaggtggaggtagactaaataatgatttcaatttaggcatcaccataaaatctaggatgtcagtaaacgttttttttgactgcttatatattctaaaagagaaatgtggtatggccaaattggagagagagaccaaggtttctacagcttacaatgttgatgaagaggaagaggaagatgaagatgaggagggagaagaagaagaagaagaagaagaactaagtagtaaagttccagaaaatatggatagccagcaactaaggacaaggaaattcaccaatgtaaggcatccagaaaagaaagcaagaaaaataattgaaacaattccgctagacccaaatccaataaatgcaggctctaccagcagtggaagctcattaacgaccccaaatagtcaagtagcgaacactatatcatatagaggaatcctcaataaaatgtcacctagggaacaactgaatcatgcaaatttagattccagtgtttctacagacatcaaggacactgaagctgtcaatgaacctctgccaatagggaggaatgctgaacatccggcaaatcaaccgcctctttcaataacacaaatgcaagaaaacacactacctgcgacacaagccaactcttctctattagaaacgtatcccattgttcaatcaaaccccgttacaactacaatcaaagaatcacccaattccatcatggcaggttgggataactgggaatctgatatggtttggagggatgttgatattttaatgaatgaatttgcgttcaatcccaaggtttaaagtccttttctttttttgccgtaatgtttacttaccctcgaaaaaatgttatgtaatgactgcggtgctacaggagaggtaaatgattttctatatacgtttatatttcttccatttacgcacactattttttgtccttgaataatttaactcaaaaaaagtgtaaaaaactgtgtcattaggtatatgttcaatacttttgatcttcaaatgacgtaaaaaaaagttttcagacggacttaaaccgccaaccagccttggccacaggtgtatgatgcgaagattcgtaagcgctcacgttagtcacatctcaggattggaaattatactagataataaatggctttatttaatcatattatagttgatataacaaatcacacctccgcttaatttatacgtaatagtatttacagtccttatgggtatcaagacatattaggttaggagaactaaagaaaaaaaaaaggactgtttgtgcaattgtacctgaagatgagtaagactctcaatgaaattagcacttttcttggatttctattaaagcgctagcatctttgtatacgtctgactgggtaaatttttgaaaggaatcgttattcatcagtctatacatttcattgctaacgatctcgaagaggggatataatttcctgaggaccttcaaagttgctggaaatgattcaaccgatttggtatcattttgggtgttgtccatgccataacgaacaattgtatgtgaattttctactgatgcattaggcgaatgcgtttctgccagagttaacggggcaggtttatattcctttaactgatgtttgaatccttgcttcttaaatgaacagttttcatttgaaagattttttgaaggttttagactcacttcaggtggttcacctaacgtgtcagcctccgttgagctaattgatgaagctgctgattccgcggatgcaggtgatggatcgtatagattagtaggaaagtgttccgataatggagaatgagggtgcaacatgatgtcagaaatattctgacgcaagttatgatggatatttaattgatatggtgatcctatcatgatataggacgaataaatgtgatatgccatttcaaggcactcattggcctgtttcattaaagctgaatcaatcgtttttacgatattgttttttgaagtactggtattagattttttatcacaatgcttagaatctatcaattttttcagaattgtcattttcttcaaaaacctcttaatctcaatgaagacatccaaattttctacacaaagttccttttctaaatggcgcctgaataaatatctcatacctggatcagttagcacatagtccagtttatttaaattactcgaagagataagcatgtcttgagaaaaaccttcactatcatccaatgtctttttttcatcacgaacagtcatatgaccccttaatgtgaaatctaggtctatggtgctaccatttggtgctctaatattattgctcttacaacctgtccaagaaaccaaatcccaaccacgcttggacaaggtaaaaaaagaggacctgctaatttgaaactttttcttgtcagtgcgtgatggttgtaaaagaactggtacaatcaaccccgtttttaaaaataacgctgccaacgagaccgcttctttaacatgcataatatcagtacagtccattatccactgccatatagcctttgttgtaaaggtgtacttaatcacgatttttttggaagtgccaaacgtcttattttcaaacaacctaatacctgcattcgaaacgtagtattgcgtgtgcgactcagaatctggatttgtaaagaatcgatgagctaatggcgataccctttctaagtcatttatatcgatgtttccaatctgagcttgccatccttgttctggcttagatttctcaaaagtaaatgtatcatcattattagtgtattccaacaacgaagataggcaaggtaatgggtcatctgcgtttgttggagaccaaacatttggcttagcgcccatcattttaatgaaaagaatatggatcaaataatcactatggatgattgaatccgtgacagagcttctctcaaaagtgaaaagtttcatggagttaaacgatgacaaaagaatatcaggcattgttttcaacccaatatctctaacatacttttgtaaaacagcaactcccttaggtgttggttggaaaagaactttctcttttggctcgccacgagttctgtcctgcggtgtatgtagtagcttagaagacataaataatgtaagaaggtggcgcgccaaactaggtttaatattatatgaaacgttaatacaagttgtgttcatatccacttttagttccaattgtcccattgctttaatagcttcctgatatgtaaaagtgaagtggaaatgtttagtgaatgcagttaataagaaagacttagtgtcactactatgttttttctctttcaaatccaaacaaattagaaaaatggaatatactgtctttaaatcattggtaaagatcagtccattcggcgttctgctgaaatttttggaagataattcatgcaacgtcctatttttatccaccatcttacaactctatctttaattaccaaattgaacctataacgcctcagatagtgcgtgcaaaacctagaaggaacgtacgacagtaacacctccaaagttaaaggacgatgagaagtaaagacagagctgggattatgatttcattcaccggtataaatataacaggacagacaacaattctaacgcaccagcaaccaaatccaagtcctagtcaaaaaaaaagcagtattgggatcattgtttcaaaattgaatattatgaaacgtttaaaacccagacatcccataattattgaagatgattcagttaaaacttcgcatacttcatggcttcttcattaatagagacaacggaggtggttcaacttgaacttttccaaaggagttgccatctctttgtattgttcgaactctttcaaaagaccttggtaatttatctatcatgtacttttcgagttaacttaagtggaagacgctggtttttcttaaagttataagcactatgtgggtaattttttattgtcagtctgtttctgatcttatccaacaattcatcaaaagttctactctggactataatctcagtgtaagcgttaaacaaataggtaaaagggtgcggaaagaccttcaaaaattcgaaaaagattgctaagttggattctttattattcaactggcatgtgacaagcgagttgtaagactgtaataacttgcttccggaatcaaaggtaaactttatcatttttttcaaatattcttgttcttgagcgcatgttaatatcggcatctcaaacacagtatattttgtgttgagtttctttttgagggatgtcgataggagagacgaaatgctaacgttatttgaataaatgaggaccttaaatgcaatgttattacttttttcaagtaccgataaaacattgataaattcggtaagcttcgaaggttctattatagttgaagtagataatttatctaattgttcgaatttgaagtagacaatatgatcgatactttcgtcattatttattttcctcataaccatcatcattaggtcagacgtgtgatttgaaggtttttcactagcttcgaaatctagttgtccgctatatgaagcctgccccattgactcgatacattcttttgatttgcttgattgaataccctctttcattaagtagtcattcatttctataattacgacatttatatcgactaaagacagtgtttctgaaactgcacggtcgataccagcatattggtgtatatgttcaactttgtcgaagaaaacgatacaatttttcatactcctaagattttttgaaagaaacttacttaagctcggaacgtagcttattgacaaataattggtgcctagctcttgcaaggccattgatttgaacttctggtagaaaacatggtccactcgctccttaactggactcggcttacacacctttgggctgctaacactttttttaattggaacaaggttcaactttctcagtacagtaaaatttttttgctccaaatcatcgcttattgctttcacaatcttgtcactgtcaacaacctttttcgatctccttataggtgcaaaatcggaatctacatgctccattgtctctatatactaaccacgttcgtatttatatctatattcgtacatatattgttctaacttattgaaattgatggttaagaagatcccttctgtacatatctgtaagcgcaatgttttcttcattgaaaacagctgcaaaattagaaaactaaaataataactttcaagataactaagccgggttgccctttgacctagaagcatcccttataataacattatgtgtatgaaaaccatgtcagcaagaacggttacggatatggagtgaagcaaaatctttaaggatttatttacattgaagaggaggaggaaaaaagagccataaggtaaaattcaaatgcataaatgaaactgcccttccttttatacttcctaacctttgcaggagaaaaatatattaaggacaaaagaaaaatagccgctatcatttccaacgctccgggaaaaagagtgtcatagagaccccttatctattttatcatttttaatatgatctattctggcataagtagcttcggatcgattaagcgctattacaattgaaggagtaacaaatttttgggtgaagtttaccaatttattcaattgatcaaatttatggaagatcctcaagaaaaacataaaattaaaacctttatatccagagtttcaaatttgtcaagtttttgttcccgttcactcttgttctgcatatttttcctatttttttggcttgtaactcaaacatgaactacatcacaaatatatcacgttacacgggaaatatacttcccattgcatggaaattaagacggaaataagggagacatgaaaaagggtcttggtggtgttgcagttggacaattaagccattcaatgcgatataaactataaatcccttttaaaagggcctagacatctcagagacaaagaacggtagctattacaaaggacagtaaaagcaaacagctttaaattagatcagaacataagaatccttagaaaagccctttacctcggtatatgtagatgatgtttccgattaatgttctactgtacaagtggcttatatttgcagtgactttcttatggagctgtaaaattttactaaggaagcttttaggaataaatataacatggattaacctgtttaaactagaaatatgcggtttatccttagaagatggtaccgtcaggctaaaatccgttcgttttgctgtatttgaaagaaagcttttcatcaagggtctacgaattgattccaagaaatcatctactaatgatcttcataaagaattaccaagagaggaagaaagaacttttatagagacccccgaagataatggtgggggcttcatttctaagattctttcattatcacaatactggctcaatggggtcacgatcattttggaagatacgcaattagtcaacaacgatatcacgattgaaaaatttggcttttttctttcaattgataactctaaacatatcaagtcactaagatttgattcctttttgagaaaacttctttggaatggccagaccatcattgctgatgccatttttatagtgaatacaaacttactaattggtgaaattatgaatcctctgaaggatggacttcaagtaggattagatttaaaactaggtgatttaaatattcccatgaatttattgaatttatttatcaacaaggagaacgttgatttgatgtccaatgaaaaacttctacaaagattggcagatacaacaaaggcgaatgaagagctaaaggatgaagatatcgctaagatgaaggatgatctcgtgtatgcaatggaaaaatttgtagatcggataaagccattgaaagaaatgaacgtcaccgttgataaacttcaaatcaaagattttccactcaccaatcatccagaactgcttggaatgaacaaatatatcagttataatgttttggtttctaatataaacttcaataccaacaggttcagaaatgagatgccaggttatacgttaatttttgaggagcgtgattctcccttcaagtttagtattataatggcaagatttaatatatatttgaatctaaatcgaaaacatcaaagccacgccaaacagttgaaaattattgaaattccaaatgtttcgatatttggcgaaaccaatttgttctctcaaaaatttcgtctttctaataacctacacgcaaaggaactagagaacgctatttttaacatcaaaggtaatatatcctccttaactattgacatggatccagtaaatatttcctttatcaaatgcttcctatcaaacattaaagtctttacgtcctcttgtccgaaaaacaagattttaaaggagaattctcatgtaaagttcttaacaaggcggagagtcctatttgactattttaagtgttttttgcctctaatcaatatgaaattcaccctggatgatcccaaatttgttatcaatgataaagacgatctgatcataggcaagttttctgtcttcatgataagccatcactctaaaagatatacattgggtaacaatcttatggaagaaaaagaagagacgcaacacattttttatgaaagccattggaatgttgaattactagatatgaaattacagcatattataaaacatcaaaaatacgagcatacaatattaagggtggacagcattgccatagaagaaaaagttcaacttttaccggatatattatgttctgcaaacgctgatatcgacacgctaatgctagatttatctgaacttccaacaatggttatgttgagtgaattagtacacaacttagatagtcagttggcaaatgtcgaagagaattatttcaaagagttctatgaaaagttcgcatctaatttacaaaatatgaaagctgaatgttctaatatggctaaatgtttgagacagaaggaaattttaccaagcgacttcatgttccagcaactacctgattttttcgattatattaaaatcaatattagagacatatcatccaccctaggtgctaggtcggtttttatgccaagagatgttttctcttccgttgactctcaaagttcaaaggacctaattgatggcaaactaagaaaatactgcaatacagtcgaaaaattgcaaattgctttatttggtgacaagacacaatggcataacaaaattggctcaaatcacgctactatggttaggtctggtcagctcacaaattttagtaaagataataaacagaatcctaaccataagtccagtattgccgatttagacgatatatcgactagtgatgcgacagaggtaaatcatctttggaacatcaacttactagtaaatgatataactacgtcaataatcggagagacacccgaagtgagcgaagaattgtccactaaaactgtttccaaagtttctaatttatcaattaagctatttccagacactgagtcatttagtagcaatgaaagcgattcgaagataattttgcaaataaatcactccagaggaacatcggtagtatcactgatgagtatctttttggccgtctcaggaatacacacactgaaccaaatatttggacattgtatacaccaaaagatgcgacagtctaaaactaaacaatactttcttgccctctcagaatccaaaaaaaaatcatgtatcaaaagtataaaatggggccaactaaaggagttactcgaaataaatttctcttctgaatatatcagccaaataatcgcactcccaaatggccttagaacaaaatttgaaccaacttcgacatttatcacagtcaaaaactgtaatacaatttcagtttcaggtcagtacttcagaatgatggtagaatctccaacgcagccaaacttttgggagagaatgatctgtatcaatggatttaaagtaatgatacacattgatttattaaaacagcaaatgaaaaagttaaactctttacagaattgggaaaaattaccatccgccataaccttagaaaatgattcatggcacttttccataccgcatcatttcgagatgtttaaaataatagattctattccaactatatttaagagtattaaacaaatgttatattcgttgaaaacatcaaaagacgatttgataattttcccccacaaaatagagactcctttatcactgccaaagattaaactgaaatctaaaaggtggttatttagcatttctgatgatccactagaggcagaattgaatactatctttcagatcggtttacaagaacaacgggagagacttgcgaaattacaggaattcaataaacgcatctctgaagatttgattaaaagtcaaaagaacgctaaagaaatgaaggacgacttcgaggcaattgataacgcaatactaaagcaccgtacaggattgtgggcaaaggatgggaaaaaaagattgcgtaaatccgcaacagattctgaaatacctcttaccccagcagctttgaacattaatggaaagcgtgatgacaggcctgatagaacgcagtttatttctcccgagattgaaaatgcgtacaatactttattagcgaacttctccgattcatggattaaaagggtgaaagaatataaagttaaagaacgtcgtgagttcgataagaacttttctttcttatggggtttcattgattatactaagctccccaaagatattaacaaaaaagttttacctttctcaacaaatccttttttaatgaatttgataattgagaatatcgatattgatataataaggccttcatgtggcattgaaaatattccaaacttcattcacgatgttggaaaaggcgttccgaagaatacagaatattcgattatgattccgatgcatttagatgcgaaatttagtgaagtaagatggcatttgagagattatcccctgccttttgttagtatacctccactaagctctacacaaagtaaagaaacaatacctatgagaatttatggggattttatgataacagaggatatgcttcaatccgacagagagcttagaactttatttgttcctttaataccatcggtaactgttgaaaatacagatagatattactcgttgttcgtgcccagaacaatgactagcgctaagatattcaccgatctaaattttgaaataaactctaaccatacaacacgagtaacttggggtggttcttatcaaccagccattcaacaaacaatgcaatgtttggataacttttcaaagcctccattagatccttctgttaaactagggttttgggataaaacaagatatcttttccatggaaagatcaatatagtttggaaaaagaggggaaaattcgaaatttcccttaaaggcgcaaaaagtccctatatgcttggcggcgaatcagctggtttcatagttggttttgatggtaatgttaacttaaaatgtaacgaagataatgatcccaaaaaatttttatcctgcagcgcagacaaggtccatttcagcattcccaattattttgcaaagccgttactggtatggtctagacctagtaccaatacaatgttcattccaaaccaggacgatacgaacatgcagagatatgcttcattttactatttattgaacactacatcaagtaaaaacgaaaaagcagacaaggaaattatgggaaaatcgttcattgaaaagacaggaattaaactatctgggggtatgacactggatatgggtattctcttcgaaaggttggggcctagtttgaatgagagaacttttgagtccaaaaagcattatttgactcgtctatgtaacccaatttacgttcaagatctctcaaaacatgattcatatgctggctttagaagtgactttatacatatgtctttcgggctatcatctaactcaaactccgcatataacgctatgcaactaagtcccaacgggttcaaggcattctttgtttggtggaaatcattttcaggaaactttcccgtaaggagagggccattatttggtctccaaagtatcagtcctaaatttggtgaacatttatataccatttcttaccacgcagatgtctcaccattattcattaattacatgtaccacaacgctgatgccgatcaaattttgcgtaaaaactacttagaagttgccgaatttgctggtttaaaggctaaatcttctcattttattatggatcttcatcaaaggaaggaagtattgactgaatatcaagccggcttgaacgtcagaaggagagttatgaaattaaaatttctggctggtgatgttgtatgccaggacgtggacatccggactgtaagtggtgagttcagtaaattaaactacattgaagagaaagaggatgctgaatatgatatttttgataatgatatgtcgtggcttgatataacagattttcaagatgcatttttcattaaccctgataattatcttccaaaaattaagattatgccatttgccttttctcctcagttcgcttatcaaaaaagagctagttatggtgacaaataccaagttgatccgaaaacatgcaagccaataacgccgtttgataatcgtgtctcccatggctgtacactagggcacaatgtttctttacgtactgacctagttgagaaacgtgttacagttttgaagaagtttcgagagaaattgcaggagggtattagaaaaaacaaatcagccggtgtatcagaggagaatttgaatgatttactctcaaaagcaaattctagtgtggaaaatgcagaattactactgaaagacttccagaagatatttaaacaacatgaagccggacaaacagaacagcctttccatttcgactctttaaatctattgaaaaacaccaaaaagaccctgaaacaatttgaacatagattttttatttttaacgtactgttgaaatggaacgaggacgcaagaagtgctattttcaaatttttttactatgctaacctatccaatgaatttgcttctttagcaagtggcaagggcctaagggaatttgaagatgtaataaagcaaagagaaatgactgatgatacaacgagtatggaagcgataccagaaggaacagacaaagcaaacaccactaaacaatgtcatagctgcgatgatacagagttcaccactgagaaccttttgaatatatttgaaaaaaatattacacaactgtcttgtgacatcaaaaataagatacaccataagttttttgtccaatttataactccacaaattcagttgacatccctggaaaatccagaagcttgtgttttggtttcttcacccttttttatgctaaagacattggaatttgatgcaaacactaccagtaacacgtatatgcaagatatttttttgaaaagacatggcattctattcggaaacgccaatgcctttttatttaataaaaaggattaccaagagttttttgaactatacttcggctccagctcatatggccaagataaaaaagaacagtggccaccatggctaggcttggagttaggattcgaaccttctgcattaaaaaagaaagcagtggttaggaatatttctgctctgcttcatcatcagaaattagcaccgttttctgctaaatatgactccttaaaagataaaatagaagataatatttgcggatacgttcctcaagttaacgtacaagtgaattctgacgagtacctaatgctgacgaagatggccttgaaattattcctttatgtagaacccgaagatgaagaattgaagaaatatattgaaaaactaattattggttacgatatctatgatacagcccaaactagaaaattcgtaaatgatttacacgatagtgaacaaattctagctgttgttgaaaaggagcttttattcaaaagaagcctattggacgacattggaaaactcgatctatccaatattcacaacgaacgcatgcatcagttgttgaggttgtatatcttaaggaaggttttcacttcaaatggaaacaattacattaataggactttagtatggaatatcaaggttaatgaaactatcttgcatttattagacaaaattgacaaaccatttttagatattgccgttgcaaagctaaactttcaaagaatccaacacacgatgggattaaggaagaacactgtaaccgtaaaaatgatgcaaatatttgacttaggcgaaaatgttaattatcattgtattttagggcctttgataacatcaagtggtaatgacacagtcggtttggcgagtgatgttccgttagttcaaataacttgggatgttgataagcctgtaggtggtattaaggttgttaaaaacgttgagaccactttgtcgagtttgacgataaaattagaagaggacagactaaataaactttttgagtggttatcgttaaaggagttaatttacgatggaaacggagatgacgatgatggagcttccagtatttttgatatggtgtcatcagaatcagaggaaggaaaaattgagttttcagaagatattagttctgatttcaatgaaatgttaaagagatcaagtgattatatgatcgttgaagatcttaaattgaacagcttcaaactttgtatcagttataagggcaaaggaaagatgagattggctaacgttactaactttgttttcaatttcccgactttaagattgtccaaccaaactttgagggtcacagatctattacttgcccttaaaaaagtgttaatcaaggttttaataaaacatactgggagatttattggtaataaattgaaaagaaattctaaggagaataaaattgctgacgacacttcaccactgaagcaactcacaacttataattcctacacggagcctgaagaacttcgttaaaaacattcaaaaaaaatttatagtttttcatatctcttaatgtagcatcatacatatcaatatgttaccatgtttcagacctttattgctgtactacattgaaatacctaggattcgaagaacaaaaaacatcatataggtcttccattagtaatgcccattatttacttaaagtaaaaaaaataatggtctctagcgggatcgaaccgctgatccccgcgttattagcacggtgccttaaccaactgggccaagagaccatgaaaaggacgtcaaaacaaggtcacacgaaaaccataacctgtagtataaatataagacatctcaagcacttgttattaattagggaaatagctaacagcatttgaacgataactaaggcaaacaatcctcagtagtaatcgttggaaaaaagatctgagaactaggtgaattttgtgataattgttaaaattccatagttgataaaggcaataacattatgtatgcaggatatgctgaagttcttctcgaggacatatgaatcctcaaagtggaatcggtagtcctgcactataatattacaattatttttcctttcgttttatatgcttacttatcctattacattatcaatctttgcatttcagcttccattaagtcagatgactgtttctcaatctttatgtcgtctttttataccgcatatgataatacacttgtaacatgaacactggtcaatagatgatgatagggtttcgttccaacaccatcacgttatcaattctttcgtgtcaactcctcatttacgttatactctttacattgtgtatggcagtatactagtagtgagaatactagtcaataggttataattgatttttattttaacaagtaacatcttcggaaaagcgactactattcaactaataatcatcaatttttacttcaagaaagcataataacgtctgcatttatgtgtgagcaggactgagcgattctgagggcacttgtattcaccaatttgcaatagctgatctttacaatctgcatgttccgataacaaaaataacttgtaggataaatcctcagagttacatcggtgtgtcagggaatgaacagataaaagaaataacgtcgcactgtaaagtgagtagcagcaaaattaaactattcggacattttaaaaccctatcagtcgccttggatgataaccttatttcaaccacctatcaatgaaaatggcttaaacttccccaattaaaaaactctgcaatagcgtgttgatttcttccagattgatagtttggtacaatacggaagaaacaaggtctctctccatttacattacggtaagctgttcttaattgaactttgaaacatccaatggcgggtaataattatagtatttttcttttctattttatttatttttttttttttttttgattttctagaataatcaatcaatggtaaataaacaaaagttgcttctgttgtaaaaaatacatcaaaggggctaaaatatcaatatacgtttcgttaagttctgcagagagatttggacatatctatttttctctcagatatttgttattgcatattgtgagttgactactggtaagcttatattggaagtttcacaagcattcttttaggacctacagtcgttgctcctcctggctttttttcccttttatttttttctgtttttacttccatttcttttgtgatattagctatccctggtttggtccgcaagtttatgacaaaagatattagaacaggcgatttagtgttatgcaaagttggctcgtttccaccttggccagctgtagtatttccacagcgtttgctgcgaaacgatgtatatagaaagagaaaatccaattgtgttgctgtttgttttttcaacgatccaacttattattgggaacaacccagtagattaaaggagctagatcaagacagcattcacaatttcatattagaacatagtaaaaatgcaaaccaaagggaattggtcaatgcttataaggaagcaaaaaattttgatgatttcaacgtatttttacaagaaaagtttgaagaagaaaacaggttaagtgatctaaaagcgtttgagaaaagtgaaggttctaaaatcgttgccggagaagatccctttgtaggtcgaacaaaagtagtgaataaaagaaaaaaaaattcaatatccatcaaagaagatccggaagataaccagaaatcaaatgaagaagaaagcaaaccgaacatcaaaccgtccaaaaaaaagagacccacagctaattcgggaggaaaatcaaacagtggcaataaaaagaaagttaaattagactattccagaagagtagaaatttcacagttatttcgccgcaggattcaaagaaatctaatccagagagaaacacctcctactgagcatgagatcaaggaaactcatgaactattaaatagaatatatgagaattctgacaccaaacggcccttttttgatttgaaggccctacgcgaaagcaaattacacaagctactgaaagcaattgttaatgatcctgacttaggcgaatttcacccactttgtaaagaaattttactgtcctgggcagacctaatcacagaactgaagaaagaaaagttgcaagcgctacctacgccttgataataatacttattgaatcaattcaatatatcaacgtttcaatatccaatattgtttcatttcatttcatttcaaataaacagtgttttaccgtttgttttgtttcccttctttttttcatcaaatggtaatattaaattgatttaattatccatccataaaaattgtattaataagtcatacacgtaatgtcacaacaaaatatcaggcgtactcttgtgacgtaccaaagcgcttagaaacgataaaggcccgggacagaaatttaaacgtcacaagtgggtgcagcccagttaacactaatgttaacgcacttctagatacctcatatatataaatattatctagaatttcaaatttgatattccttttctatactgaataaacgataaatacgaagttcagagtgcgaaaattagggttgcaggcgtctgatctgaaaaacgtataattgatagtgaaaattatgcaacattctgcaaaggaaagtaaaccttaaaaaaacaaatctctcaagcctttaaagatgaaactcaatgaacaaataccaaaagacctgttacgcctgattaaaagttccaagtatgttcatgtggcgacatgctcgtcaaattgtataccatctgtttcgttgatgcattacatatttgtttcatccgcggaaactttccataaacatgagtatagtatagaaatagattgtaatgactatattatattcacagtgttcgagaaatcagtaacctttcgtaatgtcatgagcaacccaaacgttgcattgctatttcacgattggatcacagctaaaaatttaactcttcgaaaaaaaagcgtccatagtaaagatgatttttcatttgttgagtcagagtctacaaaatttaacaactttttacgagatttgaaccaaagtgaattgaatcaagtgagcgctactatcaatggtattgctgatattgtgaaccctaatagtgaagaatctacttattataggcggttgttattaacagtcaatccagacgcagatatttttatactaggagaagatacagccataataaaggtaaatatacaaaaaataaaagtctctgacatggaaaataatacttctacatacggccaaacagtacaaccagtttaacggaaatatgatgaaaactatgtgtactctaattattatataaagcatctataaaatgaatcatgaggattaggccgtgatcttcgcgctccatatatggagaatacttttaatttcacaggagaaattaagataaataacttgaaaagtccactgagattggtgaaagtgtttcatcctctttttcagtttcccttgaacgatagggtggagtgggacaggcgggagatatgttttcctgtaacggctgcatctctggtatatttccatcccgattatatgttttcatggggctggaagtgaataatgaattcgttcttcttattggagacggggaaagatcaattttcaagggcttaatctcatcgttttctctagctagattagacatggttctcctagatttggtgtatgatggatgaatgtttgaagaatctagtaaatcctccaaaatcctgtacttctcatttgagtaattcaatgcttcttgtaatgattgtagcttgctttccaaggcttttattttctcatctcttttcttaatttgccgctgtagaagaatttctctatctaagtataatgattgatttctatcttttccactcgacccgtcagaactaccacttcttagttcactgatccgttgcttattgtatttcaactccgatatctttctcttaaaggcatcactccttaggatcctagatttggctgtatctgtgtccatataagaaggtcttccctgggatctcttcttcaaaattctagtcatgtcgccacaaacattttgcatcttgctcatattttcattatcattggaaaaaacatctctgattgtctggaatatctttgttaaccttcgtttgggtgttttcctcctgttagtacgaattttttcttcagttttcctatctgtcacctttctaggtctttttagaacgcttttacccgtaggacgcatctgctttcttctgctccttaaggcagatcgttttctcacttcatcaagggacccgtattctcgtttcctgccatcatctcgtattccaaaaaaatctttccacagtccctgtacggattttagcatattaccaatgtctattattgtacctttctcttcagagtatctacttgttcatgttcagcaataatttcataattgttgatgcgcgcatcgtttctatactatgacgcgtcacgaattgtgctagagtggcctctaatgaaagtataagaggcgttggcgaaggtcaaggatagaccattggctgtttcggatgagttatttttaaagtgtaaaggtataacatcaaatgaatgaaaattaacattgatctcagctctcaatttctttcctcatttgttttcgatgtttctatatgagtatacattaaacaagtaaatctcaagctcttgtcaaaacagttatttccaacatatctatctgcattattggtagcataattctcaaaggaagctaaaacatccttcttaaagacgtctattggcaaacgatatgttacgtattccgggtaaaacaaatattccattaagtgaaatgacctttgttttcaaaactaaccagttttagaacagtaattcatataaacaacgtgatcttatatgaaaaactcaccaaaaggagaccaatggattccacagcacttaaggtagctctaggctgtattgcaattcgtttggctgtgaacagcctttttccctctctacaacaacaactggaccagtctgtagaattctcaactcccgtaacttcatttaggtcactacaggaaggtatatacctactgcggaacaacatccaagtatataatcatggggttgttcaccatcctccaattttgattttttttctttccctctttaattccgacaggttaatttccctcatatacgctttaattgatggattaattgcgtatcagctgacagaggtaacaaaggctttcaaaaacttgaaactgaaagtttggctacctggacttctttatgccgtgaatcctttgacccttttatcgtgcattagtcggtcatcaatcatattcacaaattttgctatttcatcgtcattgtattgcatattagctgaaggaaacgttcttttgtcctctgttatgatttctatatctggatatttgtcagtataccctattctcctcttaattccgctattaggtatgctgaaaagttggaggcaaagaatattatctgccattgtttccatactatctttattaattctgctattattcagctacagtatattaggcagccaaagttggtcatttttgacacaggtttatggatctattataacctttgagaaggtttttccaaatctgggtttgtggtggtacttcttcattgaaatgtttgacaccttcataccgttcttcaaggctgtattcaacatttttattgcagtattcattacaccatttactttgcgctatcataagcagccattctacgcattcattttatgcattgggtggattgtccttacaaagccatatccctcactaggtgacgctggttttttcttcagcttcctacctttcttcacgccactatttggatatttaagataccccatcatatcagcattactgtttttacacgcaattgttttggcgccaattttctatcatctttgggttgttttaggttcagggaatagtaattttttctatgctatttccctagtttatgctctggctatagcatctatattagttgacttgaactgggcgatgctgagaattgaatacgataacggtatcccaaatttcaaattgaaggtaacacaaatttaactacttcccgtctataaacgtacataaactagaataaaaagaaccatacagatgttcatcgtaagagtggataaagcgaatatgagagccatattggttattccagaggctatctattttttaagagaaactgcttggttaaaatttgcataatattgtctcggagagaaaagatagaactcagaaggacctaattaatcatgagcgttataatacgaagaattgagatagagtgtatgatctgcggattaagctcctacataataacaacattgtacttgggactatgccaatttctttcccaccaaaagtcgtatgaaaaaggttatcttcgctagggcttccattaggtgaaagccaatatattatcatagaatagcacggcataaatatatattttgtgctgtctttttgggaagggtagtttgacaacccatgtacattaacataaaaagagctttatcattaacggacgaagaaagaatgtgtatcgcgtatttttagactatcgataatcttttttaaagttatggtagatagaagatggaatcagttacgaagtgatgagttcccatacattccagcctgtttacattagctaatttaaaaaaaaaaaacataattagaatattacgtgatgactcagtttaaacggtactctgtaacacatcatttctatttgttgttctaaaacaggttctacatatttggatctgctgtgagaatgacctaaaaggtaaaactctctttgtaataatccaaggaaagtgggagttccttggggaagctctattgcaatatattgtagtttccattcagcctgcttatcgccttaggaaaaaggaatgtaagaggcagaaaagtgcggcgcaatcgttcggacagcgagccgccattataggtaagaatacttaaagagcttcgccggatattattacagtgtattaaatttcgccaagtctttgccaatggaaatgggtgcataaatttatgtgcttggtacatatgagttcaatagatatgtagtagttggatagtagatagttaggatatataatcatggaagggttactcacaacgaatcacataatgagttatgattttcactgtgctcatctgttgcccctacaaggggtgatcaataacaaacaatttcattaaaaaaaaaaaaaaaactaagtcactataactaaacgtaataactatgtatatgaaagaaaataatatctgttcgtcatctagtttaatacggcaacgagtttttcaccagagttcttaccatatttgatgtcttttaggatatgaggaacatcacaaagcccgttcttatagacccttactggaatatggcgaatttgtccatcattaatctttggattgatgaatttgataaattttattgcagctttcctagcttctgagtcggctggtaaagtaatgtttccaaatggtacttcatggccacctattgaatatagccttattatgtcaatagtaacgttttgtctcctgttctcttttttgacgttttcttctgtcaaattttttaattcaacaattgtagcatcctgtttatcggccgcacatttgtacacttgttgaagcgtatcttgattcgcgacacagtcgactaaatacgagatattgttgtacttgtgtttaatttgttctaccacgtcaatatcatgataatcaaataattcatcagcaccatattctttcaaaagtttttcgtgcttccgagaagccacaacaatgatcttggtgaagccattcaatttattggctaattggatgagcgactgacctactgcagttgcaccgccccataataagatggggccttttctttgtggggttgatggctcccacttcaggtccaagcccaagttataggtcaacaccaagccggctgtggtcagtgacactgggatagtggctacaccttccaaagacctgacagggccggcaggtagaacatcctcacccaaaaatttgagttcattgggtgatttgtaggcaaccacagttgaaatagcagaatattcagcaaaagcaccattggaaggaaaccttacggaagatccgtgaatgaacccataaatataatcaccgatagaaaagtctttaggattgacagctgggcccaatttgacaatttggccagcagcatcacatcccagaatagatccttgaggcccgatcttgtagtcaatgtgtgcccaatcagtggggttaccagcaacagcgagtgtcttaatcaatacgaatccttcttccaattcaggaatgggaatgccctctttaacaaccgctttaccgtcttcaatgacgacagccttcatggtttctggaattgcaacttgcatgtttgtaggttatctgtaattgtcgttgataatctgtattcagcttgccattttatagaatatggttagaaagatcttaagctagataaagaaaaagaaaaaaatagaaaaaagcctgcccgctttataagaacttttctcaatatctgttgaggaacacttagtaatatcgtctatcatggttgctttattcttagtgatattactctctgggattcgatgtgttctcatcatctgaagggttttctatgtgttgaaagcctatcccactagacggagccgcgcgtcagccgggcggatccgagacatcttagtcagctgagacaagaaaggcacagctctcggacaggaactgctgtcatatgaaaacctaaaaatgtttcctggaaattccatgactgcgcaaagtttgatacgtttattgttcttctccactaccgcactttctatctcggaaacctttcaactaaatgaactattgttaattgtatggcgtgtggcctttctatttcagaaaatttagagtaaagtaaactccgtcggactagtatagtaatgaaacaagccattgactctgcagcatattgcgaccaaaacctggaaattggtggctatgagttttaatttataattatatgaaaacaaagcttggaatgctgagtactttttcttcaatgctgctcactgcccagaagcgttcagaacaactctactggagccattctgcttgaaggaggataaaaatgccaagatcaagtcttttaaagattctatcccttttcatcgaagaagcactacaagtttattttacagaagttgacaaactgtggaacttgatccatactgaataagtatggaaaactgttaacttagaggatgctctgctttctaaagaagtttcacagctttagactcacatgggttctcatgagtattgctagctagtgcgagtttgatctatacttcacagacttttaacaccccgttccttaagttttccctgattatcaagggtatttccaattcttactccccactatcgctcctttcttatctgaattgtatttttgagtggcctaattgtaatcttttattttgttttctaattattgaaggcggtttctcgaagcatttcacgatttccaaaattcaagaattgaaattatgaacatagaagacaaaatactttttttatcaactattaatacacctttcctagagaacatttttaaaataaaataaaataaagtagcgctctctactacccttacacttttctccttcatatctggctagaaaagagggattacatctcggaatcaaatatttccctctgtgcaaagttttaatactgctactacgaactggttacaattttatttttatcatacacgatactttgaacatcaacttctctcaataccatccgccttcagcggctacaattacgtaattgcaccaaggcattcgccgagagttcacaaattgcagaccctaacagtatacgactcccaacacacgtttaatgttgtacgaattcaagagatagaaatgcttcttccgcggaagccgtttaaagcactgaaattaggcttagacaatagacttctgtacgagggtccaaatctaaaattcagatattctttttgaccgaaaacggaaatcacaggcgcgcaaaagggtttttcaaggtaccccggcatccctataataggcattcccacattctgcgcatacgaatacacatgagtgccataaaacaatactccacatacgaagtctatgaaagatgtatgattcgttcagaaacaagagcatttccatactgataatgagattgtgtgaaagatgagatatggaggatatgtgaggtgctaaatgagcgtctgttaacgaatcgtttaaatagtgatgactgatgaaggcatgggtataaatagagctgcttcaactgtatgcctttgagaatatgtctttattcctttctttcctgttaagcttatatcagcactaacaaacaaaacaaatacaatggtcaaattaacttcaatcgccgctggtgtcgctgccatcgctgctactgcttccgcaaccaccactatagctcaatctgacgaaagagtcaacttggttgaattgggtgtctacgtctctgatatcagagctcacttggcccaatactacatgttccaagccgcccacccaactgaaacctacccagttgaagttgctgaagccgttttcaactacggtgacttcaccaccatgttgactggtattgccccagaccaagtgaccagaatgatcaccggtgttccatggtactccagcagattaaagccagctatctccaaggctctatccaaagatggtatctacactatcgcaaactagggacgagtgcctctacgaatgaaaattcatagacagtaaaaagtaatgaaaaataaaataaaaactacttttttttgatgatataaataccgtagattatataaatgtatattaatattataaacctatttgatcaatgacagtgttcgtgaagcattttatgaatacgataaacataaaaagaaacttttacactattctagaaaaagggtggatggtaataaagctaatagagtatgtccaataaacaataatgaaattggaagcgcatgacttctcagcactttgtctttccataaaaatgagtcgctgcttcttttttcattttttggcgcgtcgcgtcgggccgtatagaatatgcgtcacttctaagaacaagattgcagatcagggcagtgcgagttacggagtcatggtatcaaactctcatttagagaccctcattttttgacactgaaaatatcaaaatttctgggttgcgatagtttttgtgtaaccgtaaccagaaataaagctgaagggttagtgttctatcaacaataagatagagggtggtaagatgaagtgagacaatatcgtaacgtccgtttcagtatacgccgctgataagttatattaccgtaaaattatttgacatttcgttatagatcctattaaataacgtacctatcacagtatcgtcttgttcagatatagtctcttcgtatgagtagtgtcacatacaagattaaagatgcatcagttatgcttttaggatattgcggatagcatatgggaatggaaataggatacaattttatcatagcacccgcatgagtgtcaacacagtaccatattatagcacagtgaatggagagtgttacgacagtgaggtagcatattattctaatgtatggtctgcataagtacgaaatattctgaaatggcatccgttcaagcaaactgcaatattaaggaacttttacgttaatgacgtcatggtagtgttcatactccaagtcaatatgtttttgtattattgttgaagaatagaatatttttatgtttaggtgattttagtggtgatttttctgtaatattggcataagtgtatttaaattgagtggttagtatatggtgcaaaagtaatataacgtatgtattaagagcatttttacaatattcgaggccactgaatgagatatagatattaaaatgtggataatcatgggatttatgggtaaatggcacagagtatagaccgctgaggcaagtgccgtgcataatgatgtgagtgcatttggcactgatttagtgagagatgggccatggagtggagtggaatatgagagtagggtaagttgagatggtatatactgtagtatccgtgtgcgtatgacatatcagtatacaagtgaaggtgagtgtggcaagtggtggtgatggtatagagtgatagggtaagtatatgtgtattgtttacgatcatttgttaacgtttcaatatggtgggtagaacaacagtatggtgagtagtagatgggagatggtagaggaatggcagggtaagtggtggcggagttggatatgggtaattggagggtaacggttatggtggacggtgggttggtggtaggaagtagagaggtggatggtagttgggagtggtatagttgaatgagacagggtaacgagtggggagtagggtaatggagggtaagttgagagacaggttgatcagggttagagtagggtagtgttagggttaggtgtgtgtgtgtgtgtgggtgtggtgtgtgggtgtgtgggtgtggtgtggtgtgtgtgtgtgtggtgtgtgggtgtggtgggtgtggtgtgggtgtgggtgtgggtgtgggtgtgggtgtggtgtgtatatctatgtcaccttattgcatgctggatggtgttagacaaggccgtagggacatatagcatctaggaagtaaccttgtacgaaaataggcaatatttcctgtttgacgcagattttagcccaaagatctagcgtcaaggaatttttttatagtgggacattgcaaaccaaggaagtaacttgatacgtcgttggtgaatgggtctgttttcttattcggcggggtaatacatttttgggggaagtttgtctgtctgacgcgccatatgtaggtacgccaaaaagggctcctctacttcgaagcgcgaggtcgtatacctaataaggaaatgtaatttataactttttattatattggtcttttcgagagcggaacgtaggtccatgtttaaagtatccaagagaatatccacgaagcggctgagcaacgaacagaatcctggttctcctcgactaagcagatagttaagatactgtgcaccatggaaattgaaaacgaaagtacgtaccgactactttatttttgcaggccggaaatcaagcgatgaatgagacatccttctgttttctatgttgtgcttgaaggggacagacagtcgcttatcttagtgagattttgtttgcttttgctgcacctgcatagcgcagattctgcatcttctcaatagcttaattattacattcttagatgatgataagacgaaaactggacaatcttttgtttatattgatggatttcttgtcaaaaagcataaaaatcaacatactattgttaatttcgaaacttacaaaaataaaatgaaagtttccgataggcgtaagtttgaaaaagcaaactttgacgagtttgagtcggctctaaataacaaaaacgacttggtacattgtccctcaataactttatttgaatcgatccccacggaagtgcggtcattctacgaagacgaaaagtctggcctaatcaaagtggtaaaattcagaactggtgcaatggataggaaaaggtcttttgaaaaagttgtcatttccgtcatggtcgggaaaaatgtaaaaaagttcctgacgtttgttgaagacgaaccagatttccagggcggaccaatcccttcaaagtatcttgttcccaagaaaatcaacttgatggtctacacgttgtttcaagtgcatactttgaaattcaatagaaaggattacgataccctttctcttttttacctcaacagaggatactataatgagttgagtttccgtgtcctggaacgttgtcacgaaatagcgagtgctaggccgaacgacagctctacgatgcgtactttcactgactttgtttccggcgcacctattgtaaggagtcttcagaaaagcaccataaggaaatatgggtacaatttggcagcctacacgtagatgagctatgcaagcaagtttacctggcgaaaagaaagtcgacacagagcggctgaagcgtgatctatgcccacgtaaacccattgagataaagtacttttcacagatatgtaacgatatgatgaacaaaaaggaccgattgggtgatattttgcatattatcttgcgagcatgtgcactcaatttcggggcgggtccccgtggtggcgctggtgacgaagaggatcgatctattacgaatgaagaacccattattccctctgtggacgagcatggcctgaaagtatgtaagttgcgcagtcctaacactccacgaagactcagaaaaacactagatgccgtgaaagctttattggtgtcgtcttgtgcttgtaccgcaagggatttagatatatttgatgacaacaacggcgttgcaatgtggaaatggatcaaaattctgtaccacgaagtagcgcaggaaaccacgctgaaggactcttatagaataactttggtaccttcttctgatggtatatcagtatgtggaaaactttggggagagttgaacaactgcttccatatgccagcctcattttgcgtaatcgagaagttttgttcagagaaccgaagcgaggaattgacgagtatctggaaaacgattctttttttcaaatgatacctgttaaatatcgtgaaattgtgctgcccaagttgagaagagatactaacaaaatgaccgcggctcttaaaaataaagtcgctgttgcaattgacgagcttacggtgccacttatgtggatgatccattttgccgtaggatacccttaccgttatccagagcttcagctactcgcttttgccggtcctcagcgcaacgtatacgtcgatgatacaacaagacgcatccaactgtacactgattacaacaagaacggttcatcggagcctcgactaaagacgcttgacggactcacttcagattacgtgttttattttgtcactgtgctaaggcaaatgcaaatatgtgcgcttggtaacagttatgacgcttttaatcatgatccttggatggatgtggtgggatttgaggatccagatcaagtaacaaatcgagacatttcgaggatagttttgtattcctacatgtttctgaataccgcgaagggctgtctggttgaatacgcaacttttcggcagtacatgagggaacttccgaagaatgcacctcagaagctgaattttcgggagatgcgtcaggggttgattgccctaggacggcactgcgtaggtagcagatttgaaacagatttgtacgagtcggcgacgagtgaactcatggccaatcattccgttcaaacagggcgaaatatttacggtgtggattccttttcgttaactagtgtcagtgggacgaccgccactttattgcaggaacgagcttccgagcgctggattcaatggttaggccttgaaagcgactaccattgttcattctctagtactcggaatgcggaagacgtagtggcaggtgaggcggcgagttcagatcatcatcaaaaaatttcaagagtaacgcgaaaaaggccccgagagcccaagagtacaaacgatatcctcgtcgcaggccggaaactctttggcagctcctttgaattcagggacttgcatcagttgcgcttatgtcatgaaatatacatggcagacacaccctctgtggcagtacaggccccaccgggctatggtaagacggagttatttcatctccccttgatagcactggcgtctaagggcgacgtgaaatatgtgtcgtttctgtttgtaccgtacacagtgttgcttgctaattgcatgatcaggttgagccgatgcggttgcttgaatgtggcccctgtaagaaactttattgaagaaggttgcgatggcgttactgatttatacgtggggatctacgatgatcttgctagcactaatttcacagacaggatagctgcgtgggagaatattgttgagtgcacctttaggaccaacaacgtaaaattgggttacctcattgtagatgagtttcacaactttgaaacggaggtctaccggcagtcgcaatttgggggcataactaaccttgattttgacgcttttgagaaagcaatctttttgagcggcacagcacctgaggctgtagctgatgctgcgttgcagcgtattgggcttacgggactggccaagaagtcgatggacatcaacgagctcaaacggtcggaagatctcagcagaggtctatccagctatccaacacggatgtttaatctaatcaaggagaaatccgaggtgcctttagggcatgttcataaaatttggaagaaagtggaatcacagcccgaagaagcactgaagcttcttttagccctctttgaaattgaaccagagtcgaaggccattgtagttgcaagcacaaccaacgaagtggaagaattggcctgctcttggagaaagtattttagggtggtatggatacacgggaagctgggtgctgcagaaaaggtgtctcgcacaaaggagtttgtcactgacggtagcatgcgagttctcatcggaacgaaattagtgactgaaggaattgacattaagcaattgatgatggtgatcatgcttgataatagacttaatattattgagctcattcaaggcgtagggagactaagagatgggggcctctgttatctattatctagaaaaaacagttgggcggcaaggaatcgtaagggtgaattaccaccgattaaggaaggctgtataaccgaacaggtacgcgagttctatggacttgaatcaaagaaaggaaaaaagggccagcatgttggatgctgtggctccaggacagacctgtctgctgacacagtggaactgatagaaagaatggacagattggctgaaaaacaggcgacagcttccatgtcgatcattgcgttaccgtctagcttccaggagagcaatagcagtgacaggtgcagaaagtattgcagcagtgatgaggacagcgacacgtgcattcatggtagtgctaatgccagtaccaatgcgactaccaactccagcactaatgctactaccactgccagcaccaacgtcaggactagtgctactaccactgccagcatcaacgtcaggactagtgcgattaccactgaaagtaccaactccagcactaatgctactaccactgccagcaccaacgtcaggactagtgctactaccactgccagcatcaacgtcaggactagtgcgactaccactgaaagtaccaactccaacactagtgctactaccaccgaaagtaccgactccaacactagtgctactaccaccgaaagtaccgactccaacactagtgctactaccactgctagcaccaactccagcactaatgccactaccactgctagcaccaactccagcactaatgccactaccactgaaagtaccaacgctagtgccaaggaggacgccaataaagatggcaatgctgaggataatagattccatccagtcaccgacattaacaaagagtcgtataagcggaaagggagtcaaatggttttgctagagagaaagaaactgaaagcacaatttcccaatacttccgagaatatgaatgtcttacagtttcttggatttcggtctgacgaaattaaacatcttttcctctatggtattgacgtatacttctgcccagagggagtattcacacaatacggattatgcaagggctgtcaaaagatgttcgagctctgtgtctgttgggctggccagaaagtatcgtatcggaggatggcttgggaagcactagctgtggagagaatgctgcgaaatgacgaggaatacaaagaatacttggaagacatcgagccatatcatggggaccctgtaggatatttgaaatattttagcgtaaaaaggggagagatctactctcagatacagagaaattatgcttggtacctggccattactagaagaagagaaacaattagtgtattggattcgacaagaggcaagcaagggagccaagttttccgcatgtctggaaggcagatcaaagagttgtattataaagtatggagcaacttgcgtgaatcgaagacagaggtgctgcagtactttttgaactgggacgagaaaaagtgccgggaagaatgggaggcaaaagacgatacggtctttgtggaagcgctcgagaaagttggagtttttcagcgtttgcgttccatgacgagcgctggactgcagggtccgcagtacgtcaagctgcagtttagcaggcatcatcgacagttgaggagcagatatgaattaagtctaggaatgcacttgcgagatcagcttgcgctgggagttaccccatctaaagtgccgcattggacggcattcctgtcgatgctgatagggctgttctacaataaaacatttcggcagaaactggaatatcttttggagcagatttcggaggtgtggttgttaccacattggcttgatttggcaaacgttgaagttctcgctgcagataacacgagggtaccgctgtacatgctgatggtagcggttcacaaagagctggatagcgatgatgttccagacggtagatttgatataatattactatgtagagattcgagcagagaagttggagagtgaaggaaattgttgttacgaaagtcagtgattatgtattgtgtagtatagtatattgtaagaaatttttttttctagggaatatgcgttttgatgtagtagtatttcactgttttgatttagtgtttgttgcacggcagtagcgagagacaagtgggaaagagtaggataaaaagacaatctataaaaagtaaacataaaataaaggtagtaagtagcttttggttgaacatccgggtaagagacaacagggcttggaggagacgtacatgagggctatttagggctatttagggctatgtagaagtgctgtagggctaaagaacagggtttcattttcattttttttttttaatttcggtcagaaagccgggtaaggtatgacagcgagagtagaggtagatgtgagagagtgtgtgggtatatatatgtcactgtattgcatgctggatggtgttagacaaggccgtagggacatatagcatctaggaagtaaccttgtacgaaaataggcaatatttcctgtttaggcgattgtgacgcagattttagtccaacgatctagcgtcaaggaatttttttatagtgggacattgcaccaaggaagtaacttgatacgtcgtgggtgaatgggtctgttttcttattcggcggggtaatacatttttgggggaagtttgtctgtctgacgcgccatatgtaggtacgccaaaaagggctcctctacttcgaagcgcgaggtcgtatacctaataaggaaatgtaatttataactttctattatattggtcttttcgagagcggaagaagttgtaggctaagcgcaggctaagcgtaggtccatatttaaagtatccaagagaatatccacgaagcggctgagcaacgaacagaatcctggttctcctcgactaagcagatagttaagatactgtgcaccatggaaattgaaaacgaaagtacgtaccgactactttatttttgcaggccggaaatcaagcgatgaatgagacatccttctgttttctatgttgggacagacagtcgcttatcttagtgagatttcttattaactgaattttctttgctgctgctggagatttgcacctgcatagcgcagattctgcttcttctcaatagagtagcttaattattacattcttagatgatgataagacggaaactggacaatcttttgtttatattgatggatttcttgtcaaaaagcataacaatcaacatactattgttaatttcgaaacttacaaaaataaaatgaaagtttccgataggcgtaagtttgaaaaagcaaactttgacgagtttgagtcggctctaaataacaaaaacgacttggtacattgtccctcaataactttatttgaatcgatccccacggaagtgcggtcattctacgaagacgaaaagtctggcctaatcaaagtggtaaaattcagaactggtgcaatggataggaaaaggtcttttgaaaaaattgtcatttccgtcatggtcgggaaaaatgtacaaaagttcctgacatttgttgaagacgaaccagatttccagggcggaccaatcccttcaaagtatcttattcccaagaaaatcaacttgatggtctacacgttgtttcaagtgcatactttgaaattcaatagaaaggattacgataccctttctcttttttacctcaacagaggatactataatgagttgagtttccgtgtcctggaacgttgtcacgaaatagcgagtgccaggccgaacgacagctctacgatgcgtactttcactgactttgtttctggcgcacctattgtaaggagtcttcagaaaagcaccataaggaaatatgggtacaatttggcaccctacatgttcttgttactacacgtagatgagctatcgattttttctgcataccaagcaagtttacctggcgaaaagaaagtcgacacagagcggctgaagcgtgatctatgcccacgtaaacccattgagataaagtacttttcacagatatgtaacgatatgatgaacaaaaaagaccgattgggtgatattttgcatattatcttgcgagcatgtgcgctcaatttcggggcgggtccccgtggtggcgctggtgacgaagaggatcgatctattacgaatgaagaacccattattccctctgtggacgagcatggcttgaaagtatgtaagttgcgtagtcctaacactccacgaagactcagaaaaacactagatgccgtgaaagctttattggtgtcgtcttgtgcttgtactgcaagggatttagatatatttgatgacaccaacggcgttgcaatgtggaaatggatcaaaattctgtaccacgaagtagcgcaggaaaccacgctgaaggactcttatagaataactttggtaccttcttctgatggtatatcagtatgtggaaaactttttaatcgcgagtatgtccgcggcttttactttgcatgcaaggctcagttcgataacctttggggagagttgaacaactgcttttatatgcctacagtggttgatattgccagcctcattttgcgtaatcgagaagttttgttcagagagccaaagcgaggaattgacgagtatctggaaaacgattcttttcttcaaatgatacctgttaaatatcgtgaaattgtgctgcccaagttgagaagagatactaacaaaatgaccgcggctcttaaaaataaagtcactgttgcaattgacgagcttacggtgccacttatgtggatggtccattttgccgtaggatacccttaccgttatccagagcttcagctactcgcttttgccggtcctcagcgcaacgtatacgtcgatgatacaacaagacgcatccaactgtacactgattacaacaagaacggttcatcggagcctcgacttaagacgcttgacggactcacttcagattacgtgttttattttgtcactgtgctaaggcaaatgcaaatatgtgcgcttggtaacagttatgacgcttttaatcatgatccttggatggatgtggtgggatttgaggatccagatcaagtaacaaatcgagacatttcgaggatagttttgtattcctacatgtttctgaataccgcgaagggctgtctggttgaatacgcaacttttcggcagtacatgagggaacttccgaagaatgcacctcagaagctgaattttcgggagatgcgtcaggggttgattgccctaggacggcactgcgtaggtagcagatttgaaacagatttgtacgagtcggcgacgagtgaactcatggccaatcattccgttcaaacagggcgaaatatttacggtgtggattccttttcgttaactagtgtcagtgggacgaccgccactttattgcaggaacgagcttccgagcgctggattcaatggttaggccttgaaagcgactaccattgttcattctctagtactcggaatgcggaagacgtagtggcaggtgaggcggcgagttcagatcatgatcaaaaaatttcaagagtaacgcgaaaaaggccccgagagcccaagagtacaaacgatatcctcgtcgcaggccagaaactctttggcagctcctttgaattcagggacttgcatcagttgcgcttatgtcatgaaatatacatggcagacacaccctctgtggcagtacaggccccaccgggctatggtaagacggagttatttcatctccccttgatagcactggcgtctaagggcgacgtgaaatatgtgtcgtttctgtttgtaccgtacacagtgttgcttgctaattgcatgatcaggttgagccgatgcggttgcttgaatgtggcccctgtaagaaactttattgaagaaggttgcgatggcgttactgatttatacgtggggatctacgatgatcttgctagcactaatttcacagacaggatagctgcgtgggagaatattgttgagtgcacctttaggaccaacaacgtaaaattgggttacctcattgtagatgagtttcacaactttgaaacggaggtctaccggcagtcgcaatttgggggcataactaaccttgattttgacgcttttgagaaagcaatctttttgagcggcacagcacctgaggctgtagctgatgctgcgttgcagcgtattgggcttacgggactggccaagaagtcgatggacatcaacgagctcaaacggtcggaagatctcagcagaggtctatccagctatccaacacggatgtttaatctaatcaaggagaaatccgaggtgcctttagggcatgttcataaaatttggaagaaagtggaatcacagcccgaagaagcactgaagcttcttttagccctctttgaaattgaaccagagtcgaaggccattgtagttgcaagcacaaccaacgaagtggaagaattggcctgctcttggagaaagtattttagggtggtatggatacacgggaagctgggtgctgcagaaaaggtgtctcgcacaaaggagtttgtcactgacggtagcatgcgagttctcatcggaacgaaattagtgactgaaggaattgacattaagcaattgatgatggtgatcatgcttgataatagacttaatattattgagctcattcaaggcgtagggagactaagagatgggggcctctgttatctattatctagaaaaaacagttgggcggcaaggaatcgtaagggtgaattaccaccgattaaggaaggctgtataaccgaacaggtacgcgagttctatggacttgaatcaaagaaaggaaaaaagggccagcatgttggatgctgtggctccaggacagacctgtctgctgacacagtggaactgatagaaagaatggacagattggctgaaaaacaggcgacagcttccatgtcgatcattgcgttaccgtctagcttccaggagagcaatagcagtgacaggtgcagaaagtattgcagcagtgatgaggacagcgacacgtgcattcatggtagtgctaatgccagtaccaatgcgactaccaactccagcactaatgctactaccactgccagcaccaacgtcaggactagtgctactaccactgccagcatcaacgtcaggactagtgcgattaccactgaaagtaccaactccagcactaatgctactaccactgccagcaccaacgtcaggactagtgctactaccactgccagcatcaacgtcaggactagtgcgactaccactgaaagtaccaactccaacactagtgctactaccaccgaaagtaccgactccaacactagtgctactaccaccgaaagtaccgactccaacactagtgctactaccactgctagcaccaactccagcactaatgccactaccactgctagcaccaactccagcactaatgccactaccactgaaagtaccaacgctagtgccaaggaggacgccaataaagatggcaatgctgaggataatagattccatccagtcaccgacattaacaaagagtcgtataagcggaaagggagtcaaatggttttgctagagagaaagaaactgaaagcacaatttcccaatacttccgagaatatgaatgtcttacagtttcttggatttcggtctgacgaaattaaacatcttttcctctatggtattgacgtatacttctgcccagagggagtattcacacaatacggattatgcaagggctgtcaaaagatgttcgagctctgtgtctgttgggctggccagaaagtatcgtatcggaggatggcttgggaagcactagctgtggagagaatgctgcgaaatgacgaggaatacaaagaatacttggaagacatcgagccatatcatggggaccctgtaggatatttgaaatattttagcgtaaaaaggggagagatctactctcagatacagagaaattatgcttggtacctggccattactagaagaagagaaacaattagtgtattggattcgacaagaggcaagcaagggagccaagttttccgcatgtctggaaggcagatcaaagagttgtattataaagtatggagcaacttgcgtgaatcgaagacagaggtgctgcagtactttttgaactgggacgagaaaaagtgccgggaagaatgggaggcaaaagacgatacggtctttgtggaagcgctcgagaaagttggagtttttcagcgtttgcgttccatgacgagcgctggactgcagggtccgcagtacgtcaagctgcagtttagcaggcatcatcgacagttgaggagcagatatgaattaagtctaggaatgcacttgcgagatcagcttgcgctgggagttaccccatctaaagtgccgcattggacggcattcctgtcgatgctgatagggctgttctacaataaaacatttcggcagaaactggaatatcttttggagcagatttcggaggtgtggttgttaccacattggcttgatttggcaaacgttgaagttctcgctgcagataacacgagggtaccgctgtacatgctgatggtagcggttcacaaagagctggatagcgatgatgttccagacggtagatttgatataatattactatgtagagattcgagcagagaagttggagagtgaaggaaattgttgttacgaaagtcagtgattatgtattgtgtagtatagtatattgtaagaaatttttttttctagggaatatgcgttttgatgtagtagtatttcactgttttgatttagtgtttgttgcacggcagtagcgagagacaagtgggaaagagtaggataaaaagacaatctataaaaagtaaacataaaataaaggtagtaagtagcttttggttgaacatccgggtaagagacaacagggcttggaggagacgtacatgagggctattt

SEQ ID NO: 147 - DNA, 2019 bp, Saccharomyces pastorianus
atgactacaagaggtggtgtttctaaagcacagaagggtttacatttgaatgaagatatttatgctggtatgaatgctttgcttcgtggtggtcgtattaagcattgtgaatattatcaatgtggtaaaggtagagatttgggtttcggtactattttgaatttcaccacaaagattggtgccggtatgggtgaacaaatgttatctcgtgaatactactacttgggtactcaattacctgttgatcgtttcttaacattctattatgcgcatccaggtttccatttgaacaacttgttcattcaattatcgttacagatgtttatgctaactttggtgaacctgcatgctttagcccatgaatccatcctgtgtatctataatagaaacacaccaatcacagatgtcatgtatccaattggttgttataacttccatcctgcaattgactgggtgagacgttatacattatccattttcattgttttctggattgcctttgtccccattgtcgtccaagaactgattgaacgtggtatatggaaagccactcaaagatttttctgccatatattatcattgtcccctatgtttgaagtgtttgccggtcaaatttattcctctgcgttattgagtgatttggcaattggtggtgcgcgttatatttccactggtcgtggtttcgccacttctcgtataccattttctatcttatattctagatttgccggatctgctatctacatgggtgcaaggtcgattttgatgttactgttcggtactgttgcgcattggcaagctccattgttatggttctgggcatctctatcttccttaatttttgcgcctttcgttttcaacccacatcaattctcatgggaagatttcttcttagattacagagattacatcagatggctatcaagaggtaataataagtaccacagaaactcatggattggttacgttagaatgtctagagcacgtatcactgggttcaagcgtaaaacgactggtgatgaatctgaaaaggccgctggtgatgctaatagagctcatagatcaaacttgatttcttctgaaattgtaccatgtgccatttacgcagccggttgttttatcgcctttacattcattaatgctcaaactggtgtgaagaacgataaggatggtacggtgaactctgttctacgtattattatctgtacgctggctcctattgctattgatctgggtgtcttgttcttctgtatgtgtatgtcatgttgctctggtcccttattcggcatgtgctgcaaaagaacaggttccgttatggcaggtattgcgcacggtattgctgttattgtccatatagtctttttcattgtcatgtgggttctagaaggtttcaactttagtagaatgttaattggtgttgttacttgtatccaatgtcaaagactaatcttccactgtatgacagcattaatgctgactcgtgagttcaagaatgatcacgccaatacggctttctggactggtaaatggtatggtaaaggtttaggttacatggcttggactcagccagctagagaattaactgccaaagtcattgaactatctgaatttgcagctgattttgtgttggggcacgcgatcttaatttgccagttaccatttattattatcccaggtattgacaagtaccattctattatgctattttggttaaagccttctcgccaaattcgtccaccaatttattctttgaaacaaacacgcttgcgtaaacgtatggtcaagaagtactgcagtttgtacttcttagtattgcttatttttgcagggtgcattgttggccctgctgtggcttcgtctcacgttaaaaaccttggttccaaactgactggtactttccataacttggttcaaccaagaaatcaatccaataatgatacgggacaccagatgtcaacatataaaagtcactattacacaagtgcgcctcatctgaagacctggtcaactattaaatga

SEQ ID NO: 148 - DNA, 2019 bp, Saccharomyces pastorianus; identical to SEQ ID NO: 147

SEQ ID NO: 149 - DNA, 2019 bp, Saccharomyces pastorianus; identical to SEQ ID NO: 147

SEQ ID NO: 150 - DNA, 2019 bp, Saccharomyces pastorianus; identical to SEQ ID NO: 147

SEQ ID NO: 151 - DNA, 2019 bp, Saccharomyces pastorianus; identical to SEQ ID NO: 147

SEQ ID NO: 152 - DNA, 5688 bp, Saccharomyces pastorianus
atgtcctacaacgatccaaacttgaatggacagtattacagtaacggtgatgggactggtgacggtaattaccctacgtaccaagtgacacaggatcaaagtgcgtacgatgagtacggtcagccaatctatacacaaaaccaactggatgatggttattatgatccaaacgaacaatacgttgacggtacacaatttcctcagggacaagatccttcacaagaccaaggtccttataataacgatgctagttactataaccaaccccccaatatgatgaacccgtcttctcaagatggagagaacttctcagattttagcagctatggtcccccatccggcacttatcctaacgatcaatatactccttctcaaatgagttatcctgatcaagatggttcttcaggggcctcaaccccctatggaaatggtgtcgttaatggtaatggccagtactacgaccctaatgctattgaaatggctttaccaaatgatccatatcccgcatggaccgcagatccccagtctcccctgcccatcgaacaaatcgaagatatcttcatagatttaacaaataaattcggttttcagagagattccatgagaaatatgtttgaccattttatgacccttttggactctagatcttctaggatgtccccagaacaggcccttttatcattacatgcggactacataggtggagatacggccaactacaaaaaatggtactttgccgctcaacttgatatggatgatgaaattggtttcaggaatatgaagttgggtaagctatcaagaaaggcaagaaaggctaagaagaaaaataaaaaagccatgcaagaggctagtcctgaagacactgaggagactttaaatcaaatcgagggtgataactcattagaagctgcggattttagatggaagtcaaagatgaatcaactttctccatttgaaatggttcgtcaaattgccttgtttttattatgttggggcgaggcaaatcaagtcagatttactccggagtgtctttgtttcatttataaatgcgcctctgattacttagattctgcacaatgtaaacaacgtcctgatcccttgcctgaaggtgattttttgaatagagttattactcctctttatcgttttattaggagccaggtttacgaaatcgtggatggtcgatacgtgaagagtgaaaaagatcataacaaagttattgggtatgacgatgtcaatcaattattctggtatccagaaggtatagcaaaaattgtcatggaagatggaaccaggttgattgatttgccagcagaggagcgttatttgaaattgggagaaattccctgggatgatgtcttctttaaaacttacaaagaaacacgttcctggctacatttagttaccaacttcaatcgtatttggatcatgcacatctcagtatattggatgtattgtgcttacaatgctccaactttttatactcacaactatcaacaattggtcgacaatcagcctttggcagcttataaatgggccactgcagcattaggtggtactgtggcaagtttgattcaagttgccgctactttgtgcgagtggtcattcgttcctagaaaatgggcgggtgctcaacatttgtcccgtagattctggttcttgtgtgtcattatgggtattaatttggggcctgtgatatttgttttcgcttatgataaggacacagtatattctactgccgctcatgtcgttggagcagttatgttttttgttgctgtggcaacacttgttttcttttccgtaatgccattgggtggattatttacatcgtatatgaaaaagtccacaagaagttatgttgcctcacagaccttcaccgcatcttttgctccattgcatggtttagacaggtggatgtcttatttggtttgggtaaccgtttttgctgctaaatatgcagagtcatatttttttctaatactgtcactaagagatccaattaggattttatctactacgtcaatgagatgtactggtgaatactggtggggtaataagatttgtaaggtccagccaaagattgttttaggtttaatgattgcgactgacttcattttgttctttttggatacctacttgtggtatatcgttgttaacactgttttctcggtcggcaaatcgttctatttgggtatttctatcttaactccatggagaaatattttcactagattgccaaaaagaatttattctaagatcttggctactactgatatggaaataaaatataaaccgaaagtactaatttctcagatttggaatgctatcattatctccatgtacagagaacatttattagccatagaccatgtacaaaaattgttatatcatcaggttccgtccgaaattgaaggtaagaggactttgagagcaccaactttctttgtttcccaagatgacaataattttgagactgaatttttccctagagattcagaagctgagcgccgtatttcattttttgcccaatctctatccactccaattccagaaccactaccagttgacaacatgccaacatttactgtattaactccccattacgccgagaggattctattatcattgagagaaattattcgtgaagatgatcaattttcaagagttactcttttggaatacctgaagcaattacacccggtagaatgggactgttttgttaaggatacgaaaattcttgctgaagaaacggccgcatatgaaaacaatgaagatgaacctgaaaaggaagacgctctgaaatctcaaattgatgatttacctttctattgtattggtttcaaatctgctgcaccagaatacaccttacgtacgagaatctgggcctctttaaggtcgcaaactttgtatcgcacaatctcggggtttatgaattattcgagggccataaaattactttatcgtgtggaaaatccagaaatcgttcaaatgttcggtggtaatgctgatggattagaaagagaactggaaaaaatggcaaggcgaaaattcaaattcttggtttcgatgcaaagattggccaagtttaaaccacatgaactagaaaatgctgagttcctgttgagagcttatccggacttgcaaattgcctacctggatgaagaacctcccttaagcgaaggcgaagagccaagaatttactcggccttaattgatggtcattgtgagattttagagaatggtcgtagacgtcccaaatttagagttcaactatccggtaatccaattcttggtgatggtaaatcagataatcaaaatcatgctttgattttttacagaggtgagtatattcaattgattgatgctaatcaagacaattacttggaagagtgtttgaaaatcaggtctgtcttagcagaatttgaggaattgggaattgagcaaattcatccttatactcctggtttaaaatatgaggaccaatccacaaatcatcctgttgcaattgtcggcgctagagaatatattttctcagaaaactctggtgttcttggtgatgtagcggctggtaaagaacaaacttttggtacattatttgcccgtactttggcacagattggtggtaaattgcattatggtcatccagattttattaatgcgacattcatgactactaggggtggtgtttccaaagcacaaaagggtctacatttaaatgaagatatttatgccggtatgaatgccgtacttcggggtggtcgtatcaagcattgcgaatattatcagtgtggtaaaggtagagatttaggttttggtacaattttgaatttcactactaagatcggtgctggtatgggtgaacaaatgttatctcgtgaatactattatttgggtacgcaattacctattgaccgttttttaacattttattatgcgcatccagggtttcacttgaataacttatttattcaattgtctctgcagatgttcatgttaactttagtgaacttgcatgctttggctcatgaatccattctgtgtgtttacgatagggataagccaattactgatgttttgtatccaattggttgttacaactttcatcctgcgattgattgggtgagacgttatacactatctattttcatcgtcttttggattgcttttgtccctattgtcgttcaggaattaatcgagcgtggtctgtggaaggcgacacaaagatttttccgtcacattttatctctatctccaatgtttgaagtctttgctggccaaatctattcttcagcactgttaagtgatatcgctgtgggtggtgctcgttatatttcaacaggtcgtggctttgctacatctcgtatacctttctctattctttattcaagatttgcgggttcagccatttatatgggatcaagatcaatgttgatgttattatttggtaccgtggcacattggcaagctccactattatggttttgggcatcattatcagccttaatctttgcaccattcattttcaatccacatcaatttgcttgggaagattttttcctagactacagagattatatcagatggctgtcaagaggtaataataagtaccacaggaactcatggattggttatgtaagaatgtcgaggtctcgtgttactggtttcaagcgcaaactggtgggtgatgagtctgaaaaatctgcaggcgatgcaagcagggctcatagaaccaatttaattatggctgaaattataccgtgtgcgatttacgcagcaggttgttttattgccttcacgtttattaatgcacaaactggtgtcaagactactgatgaagatagagtaaattccaccttacgtatcatcatttgcaccttggcgcctattgttatcgatattggtgttttattcttctgtatgggtttgtcatgctgctctggccctttgttgggcatgtgctgcaagaaaactggttctgttatggcaggcatcgctcacggtatcgctgttgttgtccatattgtctttttcattgtcatgtgggttttagagggttttagttttgttaggatgttgattggcgttgttacatgtatacaatgtcaaaggttgatttttcactgtatgactgtactgttgctgacccgtgagttcaagaatgatcacgctaatactgccttttggacaggcaaatggtacagcaccggtttaggatatatggcatggacccaaccgacaagggaattgactgcaaaagtcattgagctttccgagtttgcagcggattttgttttggggcatgtaattttgatcttccaactaccagtcatttgtattccaaagatagataagtttcactccatcatgttattttggttaaaaccatcccgtcaaatccgtcctcctatttactctttgaaacaagcacgcctacgtaaacgtatggtcaggaggtattgcagcttgtactttttggtactgatcatattcgcgggatgcatcgttggccctgccgttgcttcagcacatgtttcaaaagaccttggatctgggttgaaggatactttccataacttggttcaaccaaggaacgtatctaacaatgatacagggttccagatgtctacttataagagtcattattacactcatacgccatccttaaagacctggtctacgatcaaatga

SEQ ID NO: 153 - DNA, 113 bp, Artificial Sequence
  Synthetic Construct
gagcagtacttccacggtgaccacactctgtccaagcagctgggcaagaagggtatcgagggcatgaacattttcaagaagaacatgttcttggccgaagatcgtattctctg

SEQ ID NO: 154 - DNA, 182 bp, Artificial Sequence
  Synthetic Construct
  misc_feature (104)..(104): y is c or t
atttgaacgaagatatttacgctggtatgaatgccatgctgcgtggtggtcgtatcaagcattgtgaatactaccaatgtggtaaaggtagagatttgggtttyggttccattttgaatttcacaaccaagattggtgctggtatgggtgaacaaatgttgtctcgtgagtactactacttg

SEQ ID NO: 155 - DNA, 17 bp, Artificial Sequence
  Synthetic Construct
tatttccacggtgacca

SEQ ID NO: 156 - DNA, 20 bp, Artificial Sequence
  Synthetic Construct
  misc_feature (9)..(9): n is inosine
gtgttgccnggtgccttctc

SEQ ID NO: 157 - DNA, 49 bp, Artificial Sequence
  Synthetic Construct
  misc_feature (49)..(49): c is a 3'-(reversed polarity)-dC nucleotide (5'-5'-phosphdiester linkage)
aatttaatacgactcactatagggagacaagaacatgttcttcttgaac

SEQ ID NO: 158 - DNA, 18 bp, Artificial Sequence
  Synthetic Construct
catgttcttggccgaaga

SEQ ID NO: 159 - RNA, 27 nt, Artificial Sequence
  Synthetic Construct
  misc_feature (24)..(24): Spacer attached to c
aaggguauugagggcaugaacaucccu
